(19) United States
(12) Patent Application Publication
(10) Pub. No.: US 2022/0041715 A1
(43) Pub. Date: Feb. 10, 2022

(54) RECOMBINANT POLYCLONAL PROTEINS TARGETING COVID-19 AND METHODS OF USE THEREOF

(71) Applicant: GigaGen, Inc., South San Francisco, CA (US)

(72) Inventors: David Scott Johnson, San Francisco, CA (US); Sheila Keating, South San Francisco, CA (US); Adam Shultz Adler, Belmont, CA (US); Michael Asensio, South San Francisco, CA (US); Kacy Stadtmiller, San Francisco, CA (US); Emily Benzie, San Francisco, CA (US); Ariel Niedecken, Sunnyvale, CA (US); Angelica V. Medina-Cucurella, Mountain View, CA (US); Rena Aviva Mizrahi, Pacifica, CA (US); Yoong Wearn Lim, South San Francisco, CA (US)

(21) Appl. No.: 17/386,504

(22) Filed: Jul. 27, 2021

Related U.S. Application Data
(63) Continuation of application No. PCT/US21/37232, filed on Jun. 14, 2021.
(60) Provisional application No. 63/038,470, filed on Jun. 12, 2020.
(60) Provisional application No. 63/061,721, filed on Aug. 5, 2020.

(51) Int. Cl. C07K 16/28; A61P 31/14

(52) U.S. Cl. CPC C07K 16/2803; A61P 31/14; A61K 2039/505; C07K 2317/92; C07K 2317/565

(57) ABSTRACT

Provided herein are compositions comprising recombinant polyclonal proteins (RPPs) derived from mammalian plasma cells and plasmablasts. Also provided are methods of using the RPPs.

### 1. CROSS REFERENCE TO RELATED APPLICATIONS

[0001] The present application is a continuation of International Application No. PCT/US21/37232, filed Jun. 14, 2021, which claims the benefit of U.S. Provisional Patent Application No. 63/038,470 filed on Jun. 12, 2020 and U.S. Provisional Patent Application No. 63/061,721 filed on Aug. 5, 2020 which are hereby incorporated by reference in their entirety.

### 2. SEQUENCE LISTING

[0002] The instant application contains a Sequence Listing with 8409 sequences which has been submitted via EFS-Web and is hereby incorporated by reference in its entirety. Said ASCII copy, created on Jun. 12, 2020, is named 49093WO_036WOsequencelisting.txt, and is 2 MB in size.

### 3. FIELD

[0003] Provided herein are recombinant polyclonal proteins (RPPs), also called recombinant polyclonal antibody proteins, recombinant hyperimmune globulins, or simply recombinant hyperimmunes, with binding specificity for SARS CoV-2 antigens, i.e., rCIG (recombinant anti-coronavirus 19 hyperimmune gammaglobulin). Included are therapeutics, vaccines, and libraries, and compositions comprising such RPPs, including pharmaceutical compositions. Also provided are methods of making RPPs, and methods of using RPPs, for example, for therapeutic purposes.

### 4. BACKGROUND

[0004] Many diseases, such as those caused by infectious viruses or bacteria with many variants or serotypes, are best treated by drugs that target multiple epitopes. An established therapeutic modality is multispecific (multivalent) antibodies derived from human or animal plasma, such as intravenous immunoglobulin (IVIG). Polyclonal antibody drugs with higher potency, known as hyperimmune globulins, are often derived from the plasma of recently vaccinated human donors, for example, HepaGam B against hepatitis B virus (HBV) and BabyBIG against infant botulism. In diseases for which human vaccination is not possible, hyperimmune globulins can be generated by immunizing animals, for example, rabbit-derived thymoglobulin (‘rabbit-ATG’) against human thymocytes for transplant tolerance. For rapid response to emerging pathogens with poorly characterized neutralizing epitopes, many groups have developed hyperimmune globulins derived from immunized animal plasma or convalescent human serum, for example, Zika virus hyperimmune globulin or severe acute respiratory syndrome coronavirus-2 (SARS-CoV-2).

[0005] Plasma-derived antibody therapeutics have substantial drawbacks. First, demand for normal and convalescent donor plasma often outstrips supply. Plasma-derived drugs have suffered from impurities, including infectious viruses and clotting factors, that have resulted in serious adverse events. Antibody drugs derived from animal plasma occasionally cause allergic reactions, lead to antidrug antibodies and have suboptimal effector properties. Because they are derived from naturally occurring proteins, plasma-derived drugs are not easily engineered; for example, it is not possible to modify Fc sequences to improve mechanism of action or drug half-life. Finally, each batch of plasma-derived drug is usually derived from a different cohort of human donors or animals, resulting in batch-to-batch variation.

[0006] Many of these problems could be solved by generating multivalent hyperimmune globulins using recombinant DNA technology. However, this strategy presents substantial technical hurdles. Most important, a recombinant hyperimmune globulin technology would have to isolate significant numbers of B cells from donors or animals, natively pair heavy and light chain immunoglobulin at a single-cell level, and then clone the sequences into recombinant expression libraries for manufacturing. Conventionally, most production cell lines for recombinant antibody drugs are generated by random integration of expression constructs into mammalian cell genomes. To prevent mispairing between heavy and light chain immunoglobulin, a recombinant polyclonal hyperimmune globulin technology would require a single genome-integration site. Pioneering work used 96-well plates to capture antibody sequences from B cells isolated from human donors immunized with Rho(D)⁺ erythrocytes and then engineer multivalent recombinant antibodies, but this approach produced drug candidates with <30 antibodies, complicating broad application and reducing potential for polyvalence.

### 5. SUMMARY

[0007] Provided herein are rCIG (recombinant anti-coronavirus 19 hyperimmune gammaglobulin), i.e., novel RPP (recombinant polyclonal proteins, also called recombinant polycolonal antibody proteins, recombinant hyperimmune globulins, or recombinant hyperimmunes) with binding specificity for a SARS-CoV-2 antigen, and methods of using such RPP, e.g., as human therapeutics. The RPP is recombinant, and its sequences are derived from peripheral blood B cells, plasma cells, or plasmablasts. The peripheral blood plasma cells or plasmablasts are mobilized by, e.g., infection of a donor with SARS-CoV-2, and the peripheral blood plasma cells or plasmablasts are specifically separated from other peripheral blood cells. The peripheral blood cells can come from any mammal, for example a mouse, a rat, a human, a monkey, a horse, or a cow.

[0008] The RPPs specifically bind SARS-CoV-2 antigens. Examples include but are not limited to, Spike S1 protein, and the receptor binding domain (RBD) of Spike S1 protein. Some RPP compositions are derived from plasma cells or plasmablasts mobilized by, e.g., infection of a donor with COVID-19. In all embodiments, the vaccine mobilizes plasma cells or plasmablasts in the peripheral blood, or causes plasma cells or plasmablasts to be mobilized in the peripheral blood.

[0009] A RPP comprises a mixture of ABPs, e.g., antibodies, and can be termed a polyclonal antibody. The mixture of antibodies can comprise 10, 100, 1,000, 10,000, 100,000 or more than 100,000 distinct antibody sequences. In some embodiments, a RPP comprises ABPs having the cognate heavy chain CDR3 and light chain CDR3 sequence disclosed herein.

[0010] In some embodiments, the antibodies of the RPP are chimeric. In some embodiments, the antibodies are humanized. In some embodiments, the antibodies are human. In some embodiments, the RPP comprises a mixture of antibody fragments. In some embodiments, the RPPs comprises a mixture of single-chain variable fragments (scFvs). In some embodiments the RPPs comprise full length antibodies. In some embodiments, the antibodies are IgGs, IgAs, or IgMs.

[0011] The RPP provided herein can induce various biological effects associated with binding to an antigen that comprises a vaccine. In some embodiments, an RPP provided herein prevents binding of a virus to a cell, which therein prevents entry of the virus into the cell. In some embodiments, the RPP binds to the cell surface of a patient's cells, in order to eliminate cells associated with a pathology.

[0012] Also provided are isolated polynucleotides encoding the RPPs provided herein, and portions thereof. In some aspects, the present invention provides a mixture of polynucleotides encoding the RPP provided herein. In other aspects, the present invention provides a mixture of vectors comprising the isolated polynucleotides. In other aspects, the present invention provides a mixture of host cell clones comprising the mixture of polynucleotides or vectors.

[0013] Also provided are methods of producing the RPP using the polynucleotides, vectors, or host cells provided herein. Some aspects of the present invention are related to a method of producing RPPs, comprising: expressing the antibodies in host cells using a library of polynucleotide vectors, and isolating the RPP.

[0014] Also provided are pharmaceutical compositions comprising the RPPs and a pharmaceutically acceptable excipient.

[0015] Also provided are methods of using the RPPs provided herein, e.g., methods of treating or preventing a disease or condition in a subject in need thereof, comprising administering to the subject an effective amount of an RPP provided herein, or a pharmaceutical composition comprising such RPP. In some aspects, the disease or condition is a viral disease, e.g., a COVID-19 infection. In some aspects the method further comprises administering one or more additional therapeutic agents. In some aspects, the additional therapeutic agent is an immune stimulatory or suppressive agent.

[0016] In some embodiments, the RPP is in an amount sufficient as prophylaxis against infectious disease when administered to a subject. In some embodiments, the RPP is an amount sufficient to clear infectious disease in an individual actively fighting infection.

[0017] In yet a further aspect, the present invention provides for a method for generating a library of recombinant antibodies, comprising: identifying a donor infected with SARS CoV-2; isolating the donor's B cells, plasma cells, or plasmablasts; generating the RPP, i.e., the library of recombinant antibodies from the B cells, plasma cells, or plasmablasts. In some embodiments, the activity of the library of recombinant antibodies exceeds a serum titer activity of said donor against the antigen by at least tenfold. The mammalian donor can comprise more than one individual. In one embodiment, the mammalian donor may be a human, mouse, humanized mouse, rat, humanized rat, horse, or cow. The method of the present invention can generate at least 100 recombinant antibodies, for example at least 1,000 recombinant antibodies, such as at least 10,000 recombinant antibodies. In one embodiment, the method of the present invention generates at least 100,000 recombinant antibodies.

[0018] With reference to the method of the present invention, the activity titer may be measured by an in vitro pathogen neutralization assay. Alternatively, the activity titer may be measured by an in vitro binding to antigen assay. In one embodiment, the activity titer may be measured by an in vivo efficacy assay.

[0019] In one embodiment, the method of the present invention can further comprise the steps of: obtaining a plurality of first linear polynucleotides, each comprising a first sequence encoding a heavy chain variable domain from a cognate pair from the single B cell, plasma cell, or plasmablast; and a second sequence encoding a light chain variable domain from the cognate pair; and a third sequence linking the first and second sequences and comprising a restriction site; and obtaining a second linear polynucleotide, not operationally linked to the first polynucleotide, comprising a fourth sequence homologous to a portion of the first polynucleotide; and circularizing each of the plurality of first polynucleotides with the second polynucleotide to generate a library of polynucleotides encoding the library of recombinant antibodies, wherein circularization is effected through Gibson Assembly; and expressing the library of recombinant antibodies in mammalian cells comprising the library of polynucleotides encoding the recombinant antibodies, thereby generating the library of recombinant antibodies.

[0020] An aspect of the present disclosure provides a recombinant polyclonal protein (RPP) (also called a Recombinant Coronavirus 2 Immune Globulin (rCIG)), comprising at least 100 first antigen binding proteins (ABPs) , each of the first ABPs comprising a cognate pair of heavy chain CDR3 and light chain CDR3, wherein each of the first ABPs specifically binds a SARS-CoV-2 receptor binding domain (RBD) or SARS-CoV-2 spike S1.

[0021] In some embodiments, each of the first ABPs comprises a heavy chain CDR3 having a sequence selected from SEQ ID Nos: 2, 4, 6, through 8390 (even numbers) and a light chain CDR3 has a sequence selected from SEQ ID Nos: 1, 3, 5, through 8389 (odd numbers).

[0022] In some embodiments, each of the first ABPs comprises a heavy chain CDR3 having a sequence selected from SEQ ID Nos: 2, 4, 6, through 4760 (even numbers) and a light chain CDR3 has a sequence selected from SEQ ID Nos: 1, 3, 5, through 4759 (odd numbers). In some embodiments, each of the first ABPs comprises a heavy chain CDR3 having a sequence selected from SEQ ID Nos: 4762,4764, 4766, through 5082 (even numbers) and a light chain CDR3 has a sequence selected from SEQ ID Nos: 4761, 4763, 4765, through 5081 (odd numbers). In some embodiments, each of the first ABPs comprises a heavy chain CDR3 having a sequence selected from SEQ ID Nos: 5084, 5086, 5088, through 6630 (even numbers) and a light chain CDR3 has a sequence selected from SEQ ID Nos: 5083, 5085, 5087, through 6629 (odd numbers). In some embodiments, each of the first ABPs comprises a heavy chain CDR3 having a sequence selected from SEQ ID Nos: 6632, 6634, 6636, through 8390 (even numbers) and a light chain CDR3 has a sequence selected from SEQ ID Nos: 6631, 6633, 6635, through 8389 (odd numbers). In some embodiments, each of the first ABPs comprises a heavy chain CDR3 having a sequence selected from SEQ ID Nos: 5084, 5086, 5088 through 8390 (even numbers) and a light chain CDR3 has a sequence selected from SEQ ID Nos: 5083, 5085, 5087, through 8389 (odd numbers).

[0023] In some embodiments, each of the first ABPs comprises a heavy chain CDR1 having the sequence of GFTX1X2X3X4X5 (SEQ ID NO: 8409). In some embodiments, each of the first ABPs comprises a heavy chain CDR1 having the sequence of GFT[V/F][S/T][S/F/T][N/S/Y][Y/A/G] (SEQ ID NO: 8391). In some embodiments, each of the first ABPs comprises a heavy chain CDR1 having a sequence selected from the group consisting of: a. GFTVS[S/F]NY (SEQ ID NO: 8392), b. GFTFTSSA (SEQ ID NO: 8393), c. GFTFSSYG (SEQ ID NO: 8394), d. GFTVSSNY (SEQ ID NO: 8395), and e. CFTVSTNY (SEQ ID NO: 8396).

[0024] In some embodiments, each of the first ABPs comprises a heavy chain CDR2 having the sequence of IX1X2X3GX4X5 (SEQ ID NO: 8397). In some embodiments, each of the first ABPs comprises a heavy chain CDRs having the sequence of I[Y/W/S][S/G/Y][G/S/D]G[S/N/SN][T/K] (SEQ ID NO: 8398). In some embodiments, each of the first ABPs comprises a heavy chain CDR2 having a sequence selected from the group consisting of: a. IYSGGST (SEQ ID NO: 8399), b. IWGSGNT (SEQ ID NO: 8400), c. ISYDGSNK (SEQ ID NO: 8401), d. IYSGGST (SEQ ID NO: 8402), and e. IYSGGST (SEQ ID NO: 8403).

[0025] In some embodiments, each of the first ABPs comprises a heavy chain CDR3 having a sequence selected from the group consisting of: a. ARDL[G/S/A][P/A/S][R/A]G[G/Y][I/F]DY (SEQ ID NO: 8404), b. AAPYCSSTSCHDAFDI (SEQ ID NO: 8405), c. AKHGYSYGYWLGYFDY (SEQ ID NO: 8406), d. AR[D/E][C/T/L][L/M][G/V][Y/I][G/P]SMDV (SEQ ID NO: 8407), and e. ARGHWEYYFDY (SEQ ID NO: 8408).

[0026] In some embodiments, each of the first ABPs comprises: a. a heavy chain CDR1 having the sequence of GFTVS[S/F]NY (SEQ ID NO: 8392), a heavy chain CDR2 having the sequence of IYSGGST (SEQ ID NO: 8399), and a heavy chain CDR3 having the sequence of ARDL[G/S/A][P/A/S][R/A]G[G/Y][I/F]DY (SEQ ID NO: 8404); b. a heavy chain CDR1 having the sequence of GFTFTSSA (SEQ ID NO: 8393), a heavy chain CDR2 having the sequence of IWGSGNT (SEQ ID NO: 8400), and a heavy chain CDR3 having the sequence of AAPYCSSTSCHDAFDI (SEQ ID NO: 8405); c. a heavy chain CDR1 having the sequence of GFTFSSYG (SEQ ID NO: 8394), a heavy chain CDR2 having the sequence of ISYDGSNK (SEQ ID NO: 8401), and a heavy chain CDR3 having the sequence of AKHGYSYGYWLGYFDY (SEQ ID NO: 8406); d. a heavy chain CDR1 having the sequence of GFTVSSNY (SEQ ID NO: 8395), a heavy chain CDR2 having the sequence of IYSGGST (SEQ ID NO: 8402), and a heavy chain CDR3 having the sequence of AR[D/E][C/T/L][L/M][G/V][Y/I][G/P]SMDV (SEQ ID NO: 8407); or e. a heavy chain CDR1 having the sequence of CFTVSTNY (SEQ ID NO: 8396), a heavy chain CDR2 having the sequence of IYSGGST (SEQ ID NO: 8403), and a heavy chain CDR3 having the sequence of ARGHWEYYFDY (SEQ ID NO: 8408).

[0027] In some embodiments, each of at least 5%, 10%, 25%, or 50% of the total ABPs in the RPP comprises: a. a heavy chain CDR1 having the sequence of GFTVS[S/F]NY (SEQ ID NO: 8392), a heavy chain CDR2 having the sequence of IYSGGST (SEQ ID NO: 8399), and a heavy chain CDR3 having the sequence of ARDL[G/S/A][P/A/S][R/A]G[G/Y][I/F]DY (SEQ ID NO: 8404); b. a heavy chain CDR1 having the sequence of GFTFTSSA (SEQ ID NO: 8393), a heavy chain CDR2 having the sequence of IWGSGNT (SEQ ID NO: 8400), and a heavy chain CDR3 having the sequence of AAPYCSSTSCHDAFDI (SEQ ID NO: 8405); c. a heavy chain CDR1 having the sequence of GFTFSSYG (SEQ ID NO: 8394), a heavy chain CDR2 having the sequence of ISYDGSNK (SEQ ID NO: 8401), and a heavy chain CDR3 having the sequence of AKHGYSYGYWLGYFDY (SEQ ID NO: 8406); d. a heavy chain CDR1 having the sequence of GFTVSSNY (SEQ ID NO: 8395), a heavy chain CDR2 having the sequence of IYSGGST (SEQ ID NO: 8402), and a heavy chain CDR3 having the sequence of AR[D/E][C/T/L][L/M][G/V][Y/I][G/P]SMDV (SEQ ID NO: 8407); or e. a heavy chain CDR1 having the sequence of CFTVSTNY (SEQ ID NO: 8396), a heavy chain CDR2 having the sequence of IYSGGST (SEQ ID NO: 8403), and a heavy chain CDR3 having the sequence of ARGHWEYYFDY (SEQ ID NO: 8408).

[0028] In some embodiments, each of the first ABPs comprises a unique heavy chain CDR3 and a unique light chain CDR3 sequence.

[0029] In some embodiments, the RPP comprises 100 to 500 first ABPs. In some embodiments, the RPP comprises 500 to 1000 first ABPs. In some embodiments, the RPP comprises 1000 to 2500 first ABPs. In some embodiments, the RPP comprises more than 2500 first ABPs.

[0030] In some embodiments, the RPP further comprises at least 100 second ABPs, wherein each of the second ABPs specifically binds an antigen of SARS-CoV-2, optionally wherein the antigen of SARS-CoV-2 is not a SARS-CoV-2 receptor binding domain (RBD) or SARS-CoV-2 spike S1.

[0031] In some embodiments, the RPP comprises at least 250, 500, 750, 1000, or 5000 second ABPs.

[0032] In some embodiments, the RPP comprises at least 1000, 5000, 10,000, or 50,000 ABPs in total.

[0033] In some embodiments, each of the first ABPs comprises a scFv. In some embodiments, each of the first ABPs is a full-length antibody. In some embodiments, each of the first ABPs is a human IgG1 subtype. In some embodiments, each of the first ABPs is produced in eukaryotic cell culture. In some embodiments, each of the first ABPs is produced in yeast cells. In some embodiments, each of the first ABPs is produced in a CHO cell.

[0034] In some embodiments, the RPP is recombinantly produced using sequences derived from B cells, plasma cells, or plasmablasts in a sample from a donor injected with the SARS-CoV-2 receptor binding domain (RBD) or SARS-CoV-2 spike S1 or infected with SARS CoV-2, optionally wherein the donor is a human. In some embodiments, each of the first ABPs is recombinantly produced using sequences derived from B cells, plasma cells, or plasmablasts in a sample from more than one donors injected with the SARS-CoV-2 receptor binding domain (RBD) or SARS-CoV-2 spike S1 or infected with SARS CoV-2, optionally wherein the donors are humans.

[0035] In some embodiments, a binding titer of the RPP is at least 50 times higher than an average binding titer of antibodies in a serum sample from the same donor, wherein the binding titer is measured by anti-SARS-CoV-2- ELISA. In some embodiments, an average binding titer of the RPP is at least 100, 200, 300, 400, 500, 600, 700, 800, 900, or 1000 times higher than an average binding titer of the serum sample, wherein the binding titer is measured by anti-SARS-CoV-2- ELISA.

[0036] In some embodiments, a neutralization titer of the RPP is at least 50 times higher than an average neutralization titer of antibodies in a serum sample from the same donor, wherein the neutralization titer is measured by an in vitro assay. In some embodiments, a neutralization titer of the RPP is at least 100, 200, 300, 400, 500, 600, 700, 800, 900, or 1000 times higher than an average neutralization titer of antibodies in the sample, wherein the neutralization titer is measured by an in vitro assay.

[0037] In another aspect, the present disclosure provides a pharmaceutical composition comprising the RPP described herein and a pharmaceutically acceptable excipient.

[0038] In yet another aspect, the present disclosure provides a method of treating a subject in need thereof, the method comprising administering to the subject an effective amount of the RPP or the pharmaceutical composition described herein. In some embodiments, the subject has a viral infection, optionally a SARS CoV-2 infection. In some embodiments, the method further comprises administration of one or more agents.

[0039] In one aspect, the present disclosure provides a plurality of isolated polynucleotides, each polynucleotide encoding an ABP of the RPP described herein. In another aspect, the present disclosure provides a plurality of isolated vectors, each vector comprising a polynucleotide encoding an ABP of the RPP described herein. In some embodiments, the vector is an expression vector.

[0040] In yet another aspect, the present disclosure provides a plurality of host cells comprising the plurality of isolated polynucleotides or the plurality of isolated vectors provided herein.

[0041] Also provided is a method of producing the RPP, the method comprising culturing the host cells described herein under conditions for expression of the RPP and isolating the RPP. In some embodiments, the RPP comprises full-length antibodies and the host cells are CHO cells. In some embodiments, the RPPs comprises scFvs and the host cells are CHO cells.

[0042] The present disclosure further provides an isolated polypeptde comprising a cognate pair of heavy chain CDR3 and light chain CDR3, wherein the heavy chain CDR3 has a sequence selected from SEQ ID Nos: 2, 4, 6, through 8390 (even numbers) and the light chain CDR3 has a sequence selected from SEQ ID Nos: 1, 3, 5, through 8389 (odd numbers). In some embodiments, the isolated polypeptide comprises a heavy chain CDR3 having the sequence of SEQ ID NO: [n+1] and a light chain CDR3 having the sequence of SEQ ID NO: [n], wherein n is an odd number from 1 to 8389.

[0043] The present disclosure additionally provides an isolated polypeptde comprising a cognate pair of heavy chain and light chain, wherein a. a heavy chain CDR1 having the sequence of GFTVS[S/F]NY (SEQ ID NO: 8392), a heavy chain CDR2 having the sequence of IYSGGST (SEQ ID NO: 8399), and a heavy chain CDR3 having the sequence of ARDL[G/S/A][P/A/S][R/A]G[G/Y][I/F]DY (SEQ ID NO: 8404); b. a heavy chain CDR1 having the sequence of GFTFTSSA (SEQ ID NO: 8393), a heavy chain CDR2 having the sequence of IWGSGNT (SEQ ID NO: 8400), and a heavy chain CDR3 having the sequence of AAPYCSSTSCHDAFDI (SEQ ID NO: 8405); c. a heavy chain CDR1 having the sequence of GFTFSSYG (SEQ ID NO: 8394), a heavy chain CDR2 having the sequence of ISYDGSNK (SEQ ID NO: 8401), and a heavy chain CDR3 having the sequence of AKHGYSYGYWLGYFDY (SEQ ID NO: 8406); d. a heavy chain CDR1 having the sequence of GFTVSSNY (SEQ ID NO: 8395), a heavy chain CDR2 having the sequence of IYSGGST (SEQ ID NO: 8402), and a heavy chain CDR3 having the sequence of AR[D/E][C/T/L][L/M][G/V][Y/I][G/P]SMDV (SEQ ID NO: 8407); or e. a heavy chain CDR1 having the sequence of CFTVSTNY (SEQ ID NO: 8396), a heavy chain CDR2 having the sequence of IYSGGST (SEQ ID NO: 8403), and a heavy chain CDR3 having the sequence of ARGHWEYYFDY (SEQ ID NO: 8408).

[0044] In one aspect, the present disclosure provides an isolated polynucleotide encoding the isolated polypeptide described above.

[0045] In another aspect, the present disclosure provides a cell comprising the isolated polypeptide or the isolated polynucleotide of the present disclosure.

[0046] In yet another aspect, the present disclosure provides a method of generating a recombinant polyclonal proteins (RPP) (also called a Recombinant Coronavirus 2 Immune Globulin (rCIG)), comprising a. providing B cells, plasma cells, or plasmablasts of a donor exposed to an antigen of SARS-CoV-2; b. amplifying a cognate pair of polynucleotides encoding a light chain variable region and a heavy chain variable region from a single cell out of the plasma cells or plasmablasts by overlap extension reverse transcriptase polymerase chain reaction (OE-RT-PCR); c. cloning polynucleotides obtained from the amplification into expression vectors, thereby obtaining constructs encoding the RPP; d. expressing the RPP from the constructs; e. enriching a subset of the constructs based on activity of the RPP or a member of the RPP against SAR-CoV-2; and f. obtaining the RPP (also called a Recombinant Coronavirus 2 Immune Globulin (rCIG)).

[0047] The present disclosure provides an RPP (also called a Recombinant Coronavirus 2 Immune Globulin (rCIG)) obtained by the method described herein. The present disclosure also provides a Recombinant Coronavirus 2 Immune Globulin (rCIG) produced using the methods described in Example 2.

[0048] One aspect of the present disclosure provides a method for producing an rCIG as described in Example 2. Another aspect of the present disclosure provides an rCIG produced using the methods described in Example 3. In yet another aspect, the present disclosure provides a method for producing an rCIG as described in Example 3.

### 6. BRIEF DESCRIPTION OF THE DRAWINGS AND TABLES

[0049] This patent or application file contains at least one drawing executed in color. Copies of this patent or patent application publication with color drawing(s) will be provided by the Office upon request and payment of the necessary fee.

[0050] FIG. 1 illustrates construct PMD-4681 used for random integration into CHOZN cells.

[0051] FIGS. 2A and 2B summarize the steps used to generate libraries of scFv constructs. (FIG. 2A) First, IgH and IgK mRNA transcripts are reverse transcribed into cDNA and then amplified with a pool of VH, VK, CHL and CK1 primers. (FIG. 2B) The CK1 and VH primers have linkers, which drive fusion of the individual IgH and IgK amplicons into a linked scFv construct. This construct is used for cloning into antibody expression construct libraries.

[0052] FIG. 3A to 3D are tables with characteristics of the donors used to create candidate RPP libraries. SOB=shortness of breath; ST=sore throat.

[0053] FIG. 4 illustrates a map for a fully assembled antibody expression plasmid.

[0054] FIG. 5 is a table with a list of assays used to characterize the rCIG RPP candidate.

[0055] FIG. 6 is a table with results of assays used to characterize rCIG RPPs.

[0056] FIG. 7A illustrates the process of isolating B cells from human donors (vaccinated or convalescent) or immunized humanized mice.

[0057] FIG. 7B illustrates the process of capturing natively paired antibody sequences from millions of single cells using droplet microfluidics.

[0058] FIG. 7C illustrates the process of enriching binders to a soluble antigen using a yeast scFv display system.

[0059] FIG. 7D illustrates the two-step process comprising (i) Gibson assembly of converting the scFv fragment to full-length antibody expression constructs and (ii) stably integrating the constructs into CHO cells following electroporation and selection.

[0060] FIG. 7E illustrates bioproduction and characterizations. The libraries were characterized by deep sequencing, in vitro binding and efficacy assays, and/or in vivo mouse efficacy studies.

[0061] FIG. 8A provides optical density measured by ELISA of individual human plasma donors against SARS-CoV-2 S1 antigen (top) or RBD antigen (bottom). Each data point represents a single measurement at a single test article dilution in a single experiment.

[0062] FIG. 8B shows FACS enrichment of scFv against CoV-2 RBD from library 1 using yeast display. The x axis measures presence of a C-terminal c-Myc tag, indicating expression of an scFv on the surface of the cell. The y axis measures binding of antigen to the scFv-expressing cells. The gates used for yeast selection (double positive) are indicated, with the percentage of scFv-expressed antigen binders in greyscale. Each plot summarizes a single FACS experiment with one yeast scFv library.

[0063] FIG. 8C provides clonal cluster analysis of rCIG antibodies. Each node represents an antibody clone (full-length heavy chain). The greyscale shades of the nodes indicate the sorted scFv library from which the CHO antibody clones were derived. The size of the nodes reflects the frequency of the clones in the final CHO cell bank (only clones ≥0.01% are plotted). The total number of amino acid differences between each pairwise alignment, and edges indicate ≤5 amino acid differences were computed.

[0064] FIG. 8D provides optiocal density measured by ELISA of the indicated samples against SARS-CoV-2 Si antigen (top) or RBD antigen (bottom). Each data point represents a single measurement at a single test article dilution, in a single experiment.

[0065] FIG. 8E provides optical density measured by ELISA of the indicated samples against the indicated antigens (different shapes). For rCIG, no binding was observed against MERS CoV S1. For the CoV-2 mAb (SAD-S35), no binding was observed against MERS CoV S1 and SARS-CoV RBD. Each data point represents a single measurement at a single test article dilution, in a single experiment.

[0066] FIG. 8F shows live virus neutralization. Individual dots are separate test articles that represent the minimum antibody concentration that achieved neutralization. Bars represent median measurements for each test article category. Each test article was run in duplicate using different aliquots of cells and virus, in a single experiment, with the same result observed for each replicate. No neutralization was seen for IVIG. A Wilcoxon rank sum test was used to compare the minimum concentration to achieve SARS-CoV-2 live virus neutralization between convalescent plasma measurements (n=16) and rCIG measurements (n=2).

[0067] FIG. 9A shows clonal cluster analysis of rZIG-IgG1 and rZIG-LALA antibodies. Each node represents an antibody clone (full-length heavy chain). The size of the nodes reflects the frequency of the clones in the final CHO cell bank (only clones ≥0.01% are plotted). The total number of amino acid differences between each pairwise alignment was computed after combining both libraries together, and edges indicate ≤5 amino acid differences.

[0068] FIG. 9B provides ELISA results of rZIG-IgG1, rZIG-LALA, and Zika/dengue+ serum control for dengue serotypes 1-4 (y axis, indicated by shape) and Zika virus antigen (x axis). Each data point represents a single test article measured against a single dengue serotype. Linear regression trendline is indicated in black. Simple linear regression was used to calculate the coefficient of determination (R2) between Zika and dengue ELISA EC₅₀ values (n=7, in a single experiment). EC50 values for all dengue serotypes were pooled for the analysis. Significance of the regression model was determined using an F-statistic with 1 and 10 d.f.

[0069] FIG. 9C shows pseudotype neutralization by rZIG-IgG1, rZIG-LALA, and Zika/dengue+ serum control for dengue serotypes 1-4 (y axis, indicated by shape) and Zika virus antigen (x axis). Each data point represents a single test article measured against a single dengue serotype, in a single experiment. Linear regression trendline is indicated in black. Simple linear regression was used to calculate the coefficient of determination (R2) between Zika and dengue pseudotype neutralization IC₅₀ values (n=11). IC₅₀ values for all dengue serotypes were pooled for the analysis. Significance of the regression model was determined using an F-statistic with 1 and 10 d.f.

[0070] FIG. 9D shows Zika pseudotype virus ADE assay results for rZIG-IgG1, rZIG-LALA, and positive and negative controls. Test article concentration is on the x axis. Fold-increase infection is on they axis, which was the infection-induced luciferase signal observed in the presence of antibody divided by the luciferase signal observed with a no-antibody control. Each data point represents a single measurement at a single test article dilution, in a single experiment.

[0071] FIG. 10A shows clonal cluster analysis of rHIG and rPIG antibodies. Each node represents an antibody clone (full-length heavy chain). The size of the nodes reflects the frequency of the clones in the final CHO cell bank (only clones ≥0.01% are plotted). The total number of amino acid differences between each pairwise alignment, and edges indicate ≤5 amino acid differences were computed.

[0072] FIG. 10B shows optical density (y-axis) measure by Anti-Hib ELISA for rHIG and IVIG. Each data point represents a single measurement at a single test article dilution, in a single experiment.

[0073] FIG. 10C shows results from serum bactericidal assay (SBA) for rHIG and IVIG with the ATCC 10211 Hib strain. Percentage of no-antibody control (y axis) was computed as the number of bacterial colonies in the test sample divided by the number of bacterial colonies in a no-antibody control sample. Each data point represents a single measurement at a single test article dilution, in a single experiment.

[0074] FIG. 10D shows rPIG fold-improvement over IVIG (y-axis) with respect to ELISA binding to (dark shade) or opsonophagocytosis of (light shade) the indicated pneumococcal serotype (x-axis). Fold improvement in binding/activity over IVIG was computed as a mean of duplicate measurements for rPIG divided by a mean of duplicate measurements for IVIG (based on the binding concentration for ELISA and the number of bacterial colonies for opsonophagocytosis). Fold improvement over IVIG, by assay (ELISA or opsonophagocytosis) was tested using a one-sample Wilcoxon signed rank test, with the null hypothesis that the median equals 1, that is, H₀=1. For each assay, all individual serotypes were pooled a single Wilcoxon signed rank test. Values for each individual serotype were generated by dividing the mean of duplicate rPIG measurements by the mean of duplicate IVIG measurements.

[0075] FIG. 10E provides in vivo assay data with ATCC 10211 Hib strain. Each circle represents CFU Hib per ml (y axis) from either peritoneal fluid or blood from a single mouse in a given test group. Black bars represent mean of the CFU Hib per ml. Dotted lines represent the lower limit of detection for CFU quantification. Welch's t-tests were used to compare CFU Hib per ml between test groups (n=8 mice per group, in a single experiment). d.f. were 7.87 for IVIG+rHIG/rPIG (500 mg kg⁻¹) and 7.13 for IVIG+rHIG/rPIG (200 mg kg⁻¹) in peritoneal fluid. d.f. were 10.87 for IVIG+rHIG/Rpig (500 mg kg⁻¹) and 8.03 for IVIG+rHIG/rPIG (200 mg kg⁻¹) in blood.

[0076] FIG. 11A provides clonal cluster analysis of rhATG antibodies. Each node represents an antibody clone (full-length heavy chain). The color of the nodes indicates the immunized library source. The shape of the nodes indicates the mouse tissue origin. The size of the nodes reflects the frequency of the clones in the final CHO cell bank (only clones ≥0.01% are plotted). The total number of amino acid differences between each pairwise alignment, and edges indicate ≤5 amino acid differences were computed.

[0077] FIG. 11B shows results from cell killing assays of a dilution series of rabbit-ATG and rhATG with three PBMC donors. They axis (% cells) was determined by dividing the number of cells of the indicated cell type present after overnight incubation with the indicated amount of antibody by the number of cells of that cell type present in a no-antibody control. Each data point represents a single measurement at a single test article dilution, in a single experiment. Linear mixed effects models were used to compute P values for each of the four cell types, with group and concentration as fixed effects and PBMC donor as a random effect to account for the dependence of repeated measures. d.f. were 31 for each of the four models. NK, natural killer.

[0078] FIG. 11C shows survival of mice (n=8 per treatment group, in a single experiment) in the GVH study using PBMC donor 1 treated every other day with a negative vehicle control, rabbit-ATG or rhATG. Treatment days are indicated by green triangles. Kaplan-Meier survival models were fit on time to mortality and pairwise log-rank tests were performed to compare median survival between treatment groups.

[0079] FIG. 11D shows the concentration of CD45+ cells determined by flow cytometry in each alive mouse on days 9, 16, 23 and 30 of the GVH study from FIG. 11C for negative vehicle control, rhATG or rabbit-ATG. Lines connect measurements from each mouse. No CD45+ cells were observed where circles intercept the x axis. Linear mixed effects models were used to compute P values for trends in CD45+ cell counts in each of the four GVH experiments (2 PBMC donors×2 drug dosing regimens=4 experiments) with day as a fixed effect and PBMC donor as a random effect to account for the dependence of repeated measures. A Wilcoxon rank sum test was used to compare CD45+ cell counts on day 9 for saline negative control versus rhATG and saline negative control versus rabbit-ATG, in each of the four GVH experiments (2 PBMC donors×2 drug dosing regimens=4 experiments).

[0080] FIGS. 12A and 12B provide schematic of Gibson assembly processes. (FIG. 12A) Product of Gibson Assembly 1 (GA1), comprising the based plasmid vector with an scFv (from Library 1) cloned between the EF1α promoter and the IgG constant domain sequence. (FIG. 12B) Product of Gibson Assembly 2 (GA2), with the scFv linker excised and replaced with a sequence that comprises an IgK constant domain sequence, a poly(A) signal sequence, and a CMV promoter.

[0081] FIG. 13A Gibson Assembly 1 (GA1) backbone (GenBank accession MW079271).

[0082] FIG. 13B Product of Gibson Assembly 1 (GA1) after insertion of an scFv sequence (GenBank accession MW079272).

[0083] FIG. 13C The linear Gibson Assembly 2 (GA2) insert sequence (GenBank accession MW079275).

[0084] FIG. 13D Product of Gibson Assembly 2 (GA2) after insertion of the GA2 insert (GenBank accession MW079273).

[0085] FIG. 13E Landing pad plasmid used to generate a custom CHO landing pad cell line (GenBank accession MW079274).

[0086] FIG. 14A shows flow sorting for SARS-CoV-2 specific antibodies using yeast scFv display. Gating strategy was used for each yeast sort.

[0087] FIG. 14B shows detection of a C-terminal c-Myc tag (x-axis), indicating expression of an scFv on the surface of the cell. The y-axis measures binding of antigen to the scFv-expressing cells. The gates used for yeast selection (double positive) are indicated, with the percentage of scFv-expressed RBD binders. A negative control and the eight rCIG convalescent donor libraries were stained with 1200 nM biotinylated CoV-2 RBDHis. An average of 1.1% of the expressed antibodies were RBD-specific on the first sort. After the second sort, the RBD-specific scFv were amplified and then cloned into full-length antibody expression plasmids.

[0088] FIG. 15 shows CoV-2 S1- and RBD-specific antibody binding measured by ELISA. rCIG, the 8 recombinant libraries, the 8 plasma pools from donors that made up rCIG, neutralizing SARS-CoV-2 mAb, nonneutralizing SARS-CoV mAb, and IVIG were titrated relative to total IgG concentration.

[0089] FIG. 16A illustrates ACE2 inhibition assay. The blocking ability of SARS-CoV-2 specific antibodies were measured using a plate-based ELISA method. Spike RBD was used to coat the plate and after the antibody samples are coincubated, ACE2 was added and measured for binding to RBD; antibodies that block the interaction demonstrate low or no binding of ACE2 and are considered neutralizing.

[0090] FIG. 16B shows results from the ACE2 inhibition assay. The recombinant polyclonal rCIG, the 8 recombinant antibody libraries, the 8 plasma pools from donors that make up rCIG, neutralizing SARS-CoV-2 mAb, non-neutralizing SARS-CoV mAb, and IVIG were titrated and added to the RBD coated plate. The data are reported as “% no Ab control”, i.e., dividing the signal of the test article by the signal of a no Ab control.

[0091] FIG. 17A illustrates CoV-2 pseudotype virus neutralization assay. A pseudotype virus expressing the SARS-CoV-2 spike proteins can infect ACE2-expressing target cells (which then turn green due to GFP expression from the pseudotype virus), which is used to demonstrate whether antibodies specific to SARS-CoV-2 can neutralize infection.

[0092] FIG. 17B shows results from the CoV-2 pseudotype virus neutralization assay. The recombinant polyclonal rCIG, the 8 recombinant antibody libraries, the eight plasma pools from donors that make up rCIG, neutralizing SARS-CoV-2 mAb, non-neutralizing SARS-CoV mAb, and IVIG were titrated and added to ACE2-expressing cells in the presence of CoV-2 pseudotype virus. The percent of infected cells (GFP+) was quantified by flow cytometry and was normalized by dividing by the GFP+ signal in the negative control wells, which lacked test article.

[0093] FIG. 17C provides flow gating strategy of the pseudotype virus neutralization assay to identify live, GFP+ cells (those infected with pseudotype virus).

[0094] FIGS. 18A and 18B show quality control analysis of purified rCIG protein. (FIG. 18A) SEC-HPLC analysis used to assess the purity of the Protein A-purified protein. (FIG. 18B) SDS-PAGE analysis used to assess the purity of the Protein A-purified protein.

[0095] FIG. 19A to 19D show stability, purity and functional assay of polished rCIG protein. (FIG. 19A) SEC-HPLC analysis used to assess the purity of the polished rCIG protein. (FIG. 19B) SDS-PAGE analysis used to assess the purity of the polished rCIG protein. (FIG. 19C) SEC-HPLC ELISA used to assess the purity and function of the rCIG protein after incubation at 4° C. or at 40° C. for 14 days, or after undergoing 3 or 25 freeze-thaw cycles (F/T). 40° C. incubation weakly increased the high molecular weight species with no change in SARS CoV-2 ELISA binding, while 25× F/T had no change in purity but had ˜50% reduced binding to SARS CoV-2. (FIG. 19D) SARS-CoV-2 S1 ELISA used to assess the purity and function of the rCIG protein after incubation at 4° C. or at 40° C. for 14 days, or after undergoing 3 or 25 freeze-thaw cycles (F/T). 40° C. incubation weakly increased the high molecular weight species with no change in SARS CoV-2 ELISA binding, while 25× F/T had no change in purity but had ˜50% reduced binding to SARS CoV-2.

[0096] FIG. 20A to 20D show repertoire sequencing analysis of rCIG. FIG. 20A is a heatmap showing antibody variable (V) gene usage from the linked scFv library (the 8 sorted libraries combined). The x-axis and y-axis show light and heavy chain V genes, respectively. The greyscale represents unique clone abundance in the library.

[0097] FIG. 20B is a histogram showing distribution of percent germline identity for variable gene (V; left panel) and joining gene (J; right panel), from the final CHO library.

[0098] FIG. 20C is a histogram showing the distribution of heavy chain CDR3 amino acid length, from the final CHO library.

[0099] FIG. 20D shows the clonal cluster analysis of rCIG antibodies from FIG. 8C (from the final CHO library) (left). FIG. 20D also shows sequence logos of all heavy chain sequences from the top five clusters (based on clone count). The first 8 amino acids (variable region primer binding sites) are not shown.

[0100] FIG. 21A to 21C shows repertoire sequencing analysis of pre- and post-sort rCIG.

[0101] FIG. 21A is a heatmap showing antibody variable (V) gene usage from each pre-sort and post-sort linked scFv library. FIG. 21B is a histogram showing distribution of percent germline identity for variable gene (V; left panel) and joining gene (J; right panel) from each pre-sort and post-sort scFv library. FIG. 21C is a histogram showing the distribution of heavy chain CDR3 amino acid length from each pre-sort and post-sort scFv library.

[0102] FIG. 22 shows antibody reactivity to SARS-CoV-2 variants and other coronaviruses. ELISA plates were coated with 2 μg/mL of spike or RBD proteins from known circulating variants of SARS-CoV-2, SARS-CoV, MERS, and other human coronaviruses (HCoV). The binding ability of rCIG, SARS-CoV-2 neutralizing mAb (SAD-S35), and IVIG was determined for each antigen. *, No binding was observed against the indicated antigen. While rCIG and the mAb had poly-variant specific responses to all SARS-CoV-2 variants, only rCIG bound SARS-CoV RBD while the mAb did not. IVIG had no specific responses to SARS-CoV-2, SARS-CoV or MERS but did have a weak response to HCoV-229E and HCoV-NL63.

[0103] FIGS. 23A and 23B provide data showing batch-to-batch variation of rCIG. RNA antibody sequencing was performed (in duplicate) on RNA isolated from the end of replicate CHO bioreactor production runs. In FIG. 23A, Jaccard (left) and Morisita (right) analyses data are provided to show the amount of antibody clone variation between production batches and between PCR replicates performed on each batch. Wilcoxon rank sum tests showed that the indices from the PCR replicates came from the same population as the indices from the batch replicates (p>0.05), suggesting that the variability inherent to the batches was no worse than the variability between PCR replicates.

[0104] FIG. 23B shows binding of the indicated batch of serially diluted rCIG and IVIG to SARS CoV-2 S1 antigen was measured by ELISA.

[0105] FIG. 23C. The indicated batch of rCIG was titrated and added to ACE2-expressing cells in the presence of CoV-2 pseudotype virus. The percent of infected cells (GFP+) was quantified by flow cytometry and was normalized by dividing by the GFP+ signal in the negative control wells, which lacked test article. Feltz & Miller's asymptotic test was used to test whether the three bioproduction batch IC50 measurements had a different coefficient of variation from eight IC50 measurements on a fourth bioproduction batch (18% vs. 17%, respectively). A p-value>0.05 suggested that the variation inherent to the batches was no worse than the variation inherent to the pseudotype neutralization assay.

[0106] FIGS. 24A and 24B show immunization induced antibody responses to Zika and Dengue in humanized mice. (FIG. 24A) Two Trianni mice were immunized weekly with Zika virus like particles (VLP), inactivated Dengue 1, Dengue 4, Dengue 3, or Dengue 2 as indicated in the figure. (FIG. 24B) After week 5, serum from the mice was tested for antibody response against a mixture of Zika and Dengue antigens and compared to pre-immunization or human seropositive controls to confirm antigen-specific antibody responses.

[0107] FIG. 25A to 25D show repertoire sequencing analysis results of rZIG. FIG. 25A is a heatmap showing antibody variable (V) gene usage from the linked scFv library. The x-axis and y-axis show light and heavy chain V genes, respectively. The greyscale gradient represents percent unique clone abundance in the library.

[0108] FIG. 25B. For each indicated rZIG library, histogram showing distribution of percent germline identity for variable gene (V; left panel) and joining gene (J; right panel), from the final CHO library.

[0109] FIG. 25C. For each indicated rZIG library, histogram showing the distribution of heavy chain CDR3 amino acid length, from the final CHO library.

[0110] FIG. 25D. Left: The clonal cluster analysis of rZIG antibodies from FIG. 9A (from the final CHO library). Right: Sequence logos of all heavy chain sequences from the top five clusters (based on clone count). The first 8 amino acids (variable region primer binding sites) are not shown.

[0111] FIG. 26A to 26B show quality control analysis of purified rZIG-IgG1 protein. FIG. 26A is SEC-HPLC analysis used to assess the purity of the Protein A-purified protein. FIG. 26B is SDS-PAGE analysis used to assess the purity of the Protein A-purified protein.

[0112] FIG. 27A to 27B show quality control analysis of purified rZIG-LALA protein. FIG. 27A is SEC-HPLC analysis used to assess the purity of the Protein A-purified protein. FIG. 27B is SDS-PAGE analysis used to assess the purity of the Protein A-purified protein.

[0113] FIG. 28 shows rZIG binding to Zika measured by ELISA. rZIG-IgG1, rZIG-LALA, negative control IVIG, and positive control Zika/Dengue positive serum were serially diluted and added to a Zika envelope-coated plate. Antigen-specific responses were quantified by an anti-human-HRP secondary antibody.

[0114] FIG. 29 shows rZIG binding to Dengue serotypes measured by ELISA. rZIG-IgG1, rZIG-LALA, negative control IVIG, and positive control Zika/Dengue positive serum were serially diluted and added to a Dengue serotypes 1, 2, 3, or 4 envelope-coated plates. Antigen-specific responses were quantified by an anti-human-HRP secondary antibody.

[0115] FIG. 30 provides results from Zika pseudotype virus neutralization assay. rZIG-IgG1, rZIG-LALA, negative control IVIG, positive control Zika/Dengue mAb, and positive control Zika/Dengue positive serum were serially diluted, co-incubated with Zika pseudotype virus, and added to BHK/DC-SIGN target cells. Antibody induced neutralization was quantified by the infection-induced luciferase expression divided by luciferase expression in the no Ab control.

[0116] FIG. 31 provides results from Dengue serotype pseudotype virus neutralization assay. rZIG-IgG1, rZIG-LALA, negative control IVIG, positive control Zika/Dengue mAb, and positive control Zika/Dengue positive serum were serially diluted, co-incubated with pseudotype virus expressing the indicated Dengue serotype envelope antigens, and added to BHK/DC-SIGN target cells. Antibody induced neutralization was quantified as “% no Ab control”, or infection-induced luciferase expression divided by the luciferase expression in the no Ab control.

[0117] FIG. 32 is a schematic of antibody dependent enhancement (ADE) assay. Antibody bound to pseudotype virus can infect cells through the Fc receptor expressed on target cells. By introducing an Fc mutation that prevents FcR binding (e.g. LALA), antibody-induced viral infection is abrogated.

[0118] FIGS. 33A and 33B show batch-to-batch variation of rZIG.

[0119] FIG. 33A is based on RNA antibody sequencing performed (in duplicate) on RNA isolated from the end of replicate CHO bioreactor production runs. Jaccard (left) and Morisita (right) analyses showed that the amount of antibody clone variation between production batches and between PCR replicates performed on each batch. Wilcoxon rank sum tests showed that the indices from the PCR replicates came from the same population as the indices from the batch replicates, suggesting that the variability inherent to the batches was no worse than the variability between PCR replicates.

[0120] FIG. 33B shows binding of the indicated batch of serially diluted rZIG-IgG1 and rZIGLALA to a Zika envelope-coated plate was measured by ELISA.

[0121] FIG. 34A to 34D shows results from repertoire sequencing analysis of rHIG.

[0122] FIG. 34A is a heatmap showing antibody variable (V) gene usage from the linked scFv library. The x-axis and y-axis show light and heavy chain V genes, respectively. The color represents percent unique clone abundance in the library.

[0123] FIG. 34B is a histogram showing distribution of percent germline identity for variable gene (V; left panel) and joining gene (J; right panel), from the final CHO library.

[0124] FIG. 34C is a histogram showing the distribution of heavy chain CDR3 amino acid length, from the final CHO library.

[0125] FIG. 34D. Left: The clonal cluster analysis of Rhig antibodies, modified from FIG. 4a (from the final CHO library). Right: Sequence logos of all heavy chain sequences

[0126] from the top five clusters (based on clone count). The first 8 amino acids (variable region primer binding sites) are not shown.

[0127] FIG. 35A to 35D provide results from repertoire sequencing analysis of rPIG.

[0128] FIG. 35A is a heatmap showing antibody variable (V) gene usage from the linked scFv library. The x-axis and y-axis show light and heavy chain V genes, respectively. The color represents percent unique clone abundance in the library.

[0129] FIG. 35B is a histogram showing distribution of percent germline identity for variable gene (V; left panel) and joining gene (J; right panel), from the final CHO library.

[0130] FIG. 35C is a histogram showing the distribution of heavy chain CDR3 amino acid length, from the final CHO library.

[0131] FIG. 35D. (d) Left: The clonal cluster analysis of Rpig antibodies, modified from FIG. 4a (from the final CHO library). Right: Sequence logos of all heavy chain sequences from the top five clusters (based on clone count). The first 8 amino acids (variable region primer binding sites) are not shown.

[0132] FIGS. 36A and 36B show quality control analysis of purified rHIG protein. FIG. 36A is from SEC-HPLC analysis used to assess the purity of the Protein A-purified protein. FIG. 36B is from SDS-PAGE analysis used to assess the purity of the Protein A-purified protein.

[0133] FIGS. 37A and 37B show quality control analysis of purified rPIG protein. FIG. 37A is from SEC-HPLC analysis were used to assess the purity of the Protein A-purified protein. FIG. 37B is from SDS-PAGE analysis used to assess the purity of the Protein A-purified protein.

[0134] FIG. 38 provides data from haemophilus influenzae serum bactericidal assay (SBA). rHIG and IVIG were serially diluted and co-incubated with 5×10⁴ CFU/mL Haemophilus influenzae Eagan strain. After incubation, complement was added, incubated, and test samples were plated on chocolate agar. After 16 hours incubation, bacteria colony counts for each serial dilution were quantified and divided by the bacteria colony counts in the no Ab control.

[0135] FIG. 39 provides data from Pneumococcal antibody binding assay using ELISA. Binding of serially diluted rPIG and IVIG to a pool of 23 pneumococcal polysaccharides was measured by ELISA.

[0136] FIG. 40A to 40B show measurement of batch-to-batch variation of rHIG. (FIG. 40A) RNA antibody sequencing was performed (in duplicate) on RNA isolated from the end of replicate CHO bioreactor production runs. Jaccard (left) and Morisita (right) analyses showed that the amount of antibody clone variation between production batches and between PCR replicates performed on each batch. Wilcoxon rank sum tests showed that the indices from the PCR replicates came from the same population as the indices from the batch replicates (p>0.05), suggesting that the variability inherent to the batches was no worse than the variability between PCR replicates. FIG. 40B show binding of the indicated batch of serially diluted rHIG and IVIG to Hib as measured by ELISA.

[0137] FIG. 41A and FIG. 41B show measurement of batch-to-batch variation of rPIG. (FIG. 41A) RNA antibody sequencing was performed (in duplicate) on RNA isolated from the end of replicate CHO bioreactor production runs. Jaccard (left) and Morisita (right) analyses showed that the amount of antibody clone variation between production batches and between PCR replicates performed on each batch. Wilcoxon rank sum tests showed that the indices from the PCR replicates came from the same population as the indices from the batch replicates (p>0.05), suggesting that the variability inherent to the batches was no worse than the variability between PCR replicates. FIG. 41B shows binding of the indicated batch of serially diluted rPIG and IVIG to a pool of 23 pneumococcal polysaccharides as measured by ELISA.

[0138] FIGS. 42A and 42B show Pneumococcal or Hib antibody binding of IVIG+rHIG/rPIG by ELISA. FIG. 42A shows binding of serially diluted rHIG, IVIG+rHIG/rPIG, and IVIG to Hib, measured by ELISA. FIG. 42B shows binding of serially diluted rPIG, IVIG+rHIG/rPIG, and IVIG to a pool of 23 pneumococcal polysaccharides, measured by ELISA.

[0139] FIG. 43A illustrates procedures for immunizing three Trianni mice weekly with T cells isolated from one human donor with ALD/MDP adjuvant. After week 5, serum from the mice was tested to confirm binding to T cells before a final boost without adjuvant 5 days prior to harvesting the organ B cells.

[0140] FIG. 43B illustrates procedures for immunizing two Trianni mice weekly with thymocytes isolated from five separate human donors with ALD/MDP adjuvant. After week 5, serum from the mice was tested to confirm binding to T cells before a final boost without adjuvant 5 days prior to harvesting the organ B cells.

[0141] FIG. 44A is a heatmap showing antibody variable (V) gene usage from the linked scFv library (the 4 libraries combined). The x-axis and y-axis show light and heavy chain V genes, respectively. The greyscale represents percent unique clone abundance in the library.

[0142] FIG. 44B provides a histogram showing distribution of percent germline identity for variable gene (V; left panel) and joining gene (J; right panel), from the final CHO library.

[0143] FIG. 44C is a histogram showing the distribution of heavy chain CDR3 amino acid length, from the final CHO library.

[0144] FIG. 44D. Left: The clonal cluster analysis of rhATG antibodies from FIG. 11A (from the CHO libraries). Right: Sequence logos of all heavy chain sequences from the top five clusters (based on clone count). The first 8 amino acids (variable region primer binding sites) are not shown.

[0145] FIG. 45A-45B shows quality control analysis of purified rhATG protein. FIG. 45A shows a result from SEC-HPLC analysis used to assess the purity of the Protein A-purified protein. FIG. 45B shows a result from SDS-PAGE analysis used to assess the purity of the Protein A-purified protein.

[0146] FIG. 46A-46B show ATG immune cell-specific antibody responses measure by ELISA. The indicated Immune cell antigens were coated onto ELISA plates. (FIG. 46A) rabbit-ATG was serially diluted and added to the plate. Antibody bound to antigens were quantified by anti-rabbit-HRP or anti-human-HRP, respectively. (FIG. 46B) h-ATG were serially diluted and added to the plate. Antibody bound to antigens were quantified by anti-rabbit-HRP or anti-human-HRP, respectively.

[0147] FIG. 47 shows ATG binding to red blood cells by ELISA. RBC-specific antibody response was measured by Immucor Capture-R ELISA. Rabbit-ATG and rhATG were serially diluted and added to the Immucor Capture-R plate. RBC-bound antibodies were quantified by anti-rabbit-HRP or anti-human-HRP, respectively.

[0148] FIGS. 48A and 48B show survival of mice in the GVHD study after ATG treatment. (FIG. 48A) Eight animals per treatment group were engrafted with 10⁷ PBMC from one of two donors. Animals were treated with rhATG, rabbit-ATG, or vehicle control either every other day beginning at day 5 or on days 5, 6, and 7 (treatment days are indicated by triangles), then monitored for progression to GVHD and death. ** p<0.01, *** p<0.001, n.s. not significant. (FIG. 48B) Eight animals per treatment group were engrafted with 10⁷ PBMC from one of two donors. Animals were treated with rhATG, rabbit-ATG, or vehicle control either every other day beginning at day 5 or on days 5, 6, and 7 (treatment days are indicated by triangles), then monitored for progression to GVHD and death. ** p<0.01, *** p<0.001, n.s. not significant.

[0149] FIGS. 49A and 49B show flow cytometry of CD45+ cells from the ATG GVHD study. (FIG. 49A) Eight animals per treatment group were engrafted with 10⁷ PBMC from one of two donors. Animals were treated with rhATG, rabbit-ATG, or vehicle control either every other day beginning at day 5 or on days 5, 6, and 7. Flow cytometry was used to determine the concentration of CD45+ cells from each alive mouse on Days 9, 16, 23, and 30. Lines connect measurements from each mouse. No CD45+ cells were observed where circles intercept the x-axis. ** p<0.01, *** p<0.001.

[0150] (FIG. 49B) Eight animals per treatment group were engrafted with 10⁷ PBMC from one of two donors. Animals were treated with rhATG, rabbit-ATG, or vehicle control either every other day beginning at day 5 or on days 5, 6, and 7. Flow cytometry was used to determine the concentration of CD45+ cells from each alive mouse on Days 9, 16, 23, and 30. Lines connect measurements from each mouse. No CD45+ cells were observed where circles intercept the x-axis. ** p<0.01, *** p<0.001.

[0151] FIGS. 50A and 50B show ATG assay flow gating strategies. (FIG. 50A) Flow gating strategy for the ATG PBMC killing assay to quantify cytotoxic T cells, T helper cells, B cells, and NK cells. (FIG. 50B) Flow gating strategy of the GVH study to quantify CD45+ cells.

[0152] FIGS. 51A and 52B show data from SARS-CoV-2 pseudotype virus neutralization assay. Wuhan-Hu-1 as well as arising SARS-CoV-2 variants (B.1.1.7 (UK), B.1.351 (South Africa), P.1 (Japanese/Brazilian), and B.1.427/B.1.429 (California)) were psudotyped and tested. FIG. 51A shows % of infected cells normalized to infected cells under a control condition without application of antibodies. FIG. 51B summarizes IC₅₀ value (μg/mL) for psudotype virus of the tested SARS-CoV-2 variants.

### 7. DETAILED DESCRIPTION

[0153] Definitions

[0154] Unless otherwise defined herein, scientific and technical terms used in connection with the present invention shall have the meanings that are commonly understood by those of ordinary skill in the art. Further, unless otherwise required by context, singular terms shall include pluralities and plural terms shall include the singular. Generally, nomenclatures used in connection with, and techniques of, cell and tissue culture, molecular biology, immunology, microbiology, genetics and protein and nucleic acid chemistry and hybridization described herein are those well-known and commonly used in the art. The methods and techniques of the present invention are generally performed according to conventional methods well known in the art and as described in various general and more specific references that are cited and discussed throughout the present specification unless otherwise indicated. See, e.g., Sambrook et al. Molecular Cloning: A Laboratory Manual, 2d ed., Cold Spring Harbor Laboratory Press, Cold Spring Harbor, N.Y. (1989) and Ausubel et al., Current Protocols in Molecular Biology, Greene Publishing Associates (1992), and Harlow and Lane Antibodies: A Laboratory Manual Cold Spring Harbor Laboratory Press, Cold Spring Harbor, N.Y. (1990), which are incorporated herein by reference. Enzymatic reactions and purification techniques are performed according to manufacturer's specifications, as commonly accomplished in the art or as described herein. The terminology used in connection with, and the laboratory procedures and techniques of, analytical chemistry, synthetic organic chemistry, and medicinal and pharmaceutical chemistry described herein are those well-known and commonly used in the art. Standard techniques can be used for chemical syntheses, chemical analyses, pharmaceutical preparation, formulation, and delivery, and treatment of patients.

[0155] The following terms, unless otherwise indicated, shall be understood to have the following meanings:

[0156] The term “recombinant polyclonal protein” or “RPP” refers to more than one recombinant antigen binding proteins (ABPs), collectively comprising more than one antigen-binding domains that specifically bind to an antigen or epitope, or multiple antigens and epitopes. The recombinant polyclonal protein or RPP can be antibodies or variants or derivatives thereof. In some embodiments, the antigen-binding domains bind an antigen or epitope with specificity and affinity similar to that of a naturally occurring antibody. In some embodiments, an RPP comprises antibodies. In some embodiments, the RPP consists essentially of antibodies. In some embodiments, an RPP is a mixture of antibodies. In some embodiments, an RPP comprises scFvs. In some embodiments, the RPP comprises an alternative scaffold. In some embodiments, the RPP consists of alternative scaffolds. In some embodiments, the RPP consists essentially of alternative scaffolds. In some embodiments, the RPP comprises an antibody fragment. In some embodiments, the RPP consists of antibody fragments. In some embodiments, the RPP consists essentially of antibody fragments.

[0157] The term “antigen binding protein” or “ABP” as used herein refers to a protein comprising one or more antigen-binding domains that specifically bind to an antigen or epitope. In some embodiments, the ABP comprises an antibody. In some embodiments, the ABP consists of an antibody. In some embodiments, the ABP consists essentially of an antibody. In some embodiments, the ABP comprises an alternative scaffold. In some embodiments, the ABP consists of an alternative scaffold. In some embodiments, the ABP consists essentially of an alternative scaffold. In some embodiments, the ABP comprises an antibody fragment. In some embodiments, the ABP consists of an antibody fragment. In some embodiments, the ABP consists essentially of an antibody fragment.

[0158] The term “antibody” is used herein in its broadest sense and includes certain types of immunoglobulin molecules comprising one or more antigen-binding domains that specifically bind to an antigen or epitope. An antibody specifically includes intact antibodies (e.g., intact immunoglobulins), antibody fragments, and multi-specific antibodies. One example of an antigen-binding domain is an antigen-binding domain formed by a V_{H}-V_{L} dimer.

[0159] The term “alternative scaffold” refers to a molecule in which one or more regions may be diversified to produce one or more antigen-binding domains that specifically bind to an antigen or epitope. In some embodiments, the antigen-binding domain binds the antigen or epitope with specificity and affinity similar to that of naturally occurring antibodies. Exemplary alternative scaffolds include those derived from fibronectin (e.g., Adnectins™), the β-sandwich (e.g., iMab), lipocalin (e.g., Anticalins®), EETI-II/AGRP, BPTI/LACI-D1/ITI-D2 (e.g., Kunitz domains), thioredoxin peptide aptamers, protein A (e.g., Affibody®), ankyrin repeats (e.g., DARPins), gamma-B-crystallin/ubiquitin (e.g., Affilins), CTLD₃ (e.g., Tetranectins), Fynomers, and (LDLR-A module) (e.g., Avimers). Additional information on alternative scaffolds is provided in Binz et al., Nat. Biotechnol., 2005 23:1257-1268; Skerra, Current Opin. in Biotech., 2007 18:295-304; and Silacci et al., J. Biol. Chem., 2014, 289:14392-14398; each of which is incorporated by reference in its entirety. Alternative scaffolds comprise one type of RPP.

[0160] The term “antigen-binding domain” means the portion of an antibody that is capable of specifically binding to an antigen or epitope.

[0161] The terms “full length antibody,” “intact antibody,” and “whole antibody” are used herein interchangeably to refer to an antibody having a structure substantially similar to a naturally occurring antibody structure and having heavy chains that comprise an Fc region.

[0162] The term “immunoglobulin” refers to a class of structurally related proteins, e.g., antibodies, generally comprising two pairs of polypeptide chains: one pair of light (L) chains and one pair of heavy (H) chains. In an “intact immunoglobulin,” all four of these chains are interconnected by disulfide bonds. The structure of immunoglobulins has been well characterized. See, e.g., Paul, Fundamental Immunology 7th ed., Ch. 5 (2013) Lippincott Williams & Wilkins, Philadelphia, Pa. Briefly, each heavy chain typically comprises a heavy chain variable region (V_{H}) and a heavy chain constant region (C_{H}). The heavy chain constant region typically comprises three domains, abbreviated C_{H1}, C_{H2}, and C_{H3}. Each light chain typically comprises a light chain variable region (V_{L}) and a light chain constant region. The light chain constant region typically comprises one domain, abbreviated C_{L}.

[0163] The term “Fc region” means the C-terminal region of an immunoglobulin heavy chain that, in naturally occurring antibodies, interacts with Fc receptors and certain proteins of the complement system. The structures of the Fc regions of various immunoglobulins, and the glycosylation sites contained therein, are known in the art. See Schroeder and Cavacini, J. Allergy Clin. Immunol., 2010, 125:S41-52, incorporated by reference in its entirety. The Fc region may be a naturally occurring Fc region, or an Fc region modified as described elsewhere in this disclosure.

[0164] The V_{H} and V_{L} regions may be further subdivided into regions of hypervariability (“hypervariable regions (HVRs)” also called “complementarity determining regions” (CDRs)) interspersed with regions that are more conserved. The more conserved regions are called framework regions (FRs). Each V_{H} and V_{L} generally comprises three CDRs and four FRs, arranged in the following order (from N-terminus to C-terminus): FR1-CDR1-FR2-CDR2-FR3-CDR3-FR4. The CDRs are involved in antigen binding, and influence antigen specificity and binding affinity of the antibody. See Kabat et al., Sequences of Proteins of Immunological Interest 5th ed. (1991) Public Health Service, National Institutes of Health, Bethesda, Md., incorporated by reference in its entirety.

[0165] The light chain from any vertebrate species can be assigned to one of two types, called kappa (κ) and lambda (λ), based on the sequence of its constant domain.

[0166] The heavy chain from any vertebrate species can be assigned to one of five different classes (or isotypes): IgA, IgD, IgE, IgG, and IgM. These classes are also designated α, δ, ε, γ, and μ, respectively. The IgG and IgA classes are further divided into subclasses on the basis of differences in sequence and function. Humans express the following subclasses: IgG1, IgG2, IgG3, IgG4, IgA1, and IgA2.

[0167] The amino acid sequence boundaries of a CDR can be determined by one of skill in the art using any of a number of known numbering schemes, including those described by Kabat et al., supra (“Kabat” numbering scheme); Al-Lazikani et al., 1997, J. Mol. Biol., 273:927-948 (“Chothia” numbering scheme); MacCallum et al., 1996, J. Mol. Biol. 262:732-745 (“Contact” numbering scheme); Lefranc et al., Dev. Comp. Immunol., 2003, 27:55-77 (“IMGT” numbering scheme); and Honegge and Plückthun, J. Mol. Biol., 2001, 309:657-70 (“AHo” numbering scheme); each of which is incorporated by reference in its entirety.

[0168] Table 1 provides the positions of CDR1-L (CDR1 of V_{L}), CDR2-L (CDR2 of V_{L}), CDR3-L (CDR3 of V_{L}), CDR1-H (CDR1 of V_{H}), CDR2-H (CDR2 of V_{H}), and CDR3-H (CDR3 of V_{H}), as identified by the Kabat and Chothia schemes. For CDR1-H, residue numbering is provided using both the Kabat and Chothia numbering schemes.

[0169] CDRs may be assigned, for example, using antibody numbering software, such as Abnum, available at www.bioinf.org.uk/abs/abnum/, and described in Abhinandan and Martin, Immunology, 2008, 45:3832-3839, incorporated by reference in its entirety.

TABLE 1
Residues in CDRs according to
Kabat and Chothia numbering schemes.

| CDR | Kabat | Chothia |
|---|---|---|
| CDR1-L | 24-34 | 24-34 |
| CDR2-L | 50-56 | 50-56 |
| CDR3-L | 89-97 | 89-97 |
| CDR1-H | 31-35B | 26-32 or 34* |
| (Kabat Numbering) | | |
| CDR1-H | 31-35 | 26-32 |
| (Chothia Numbering) | | |
| CDR2-H | 50-65 | 52-56 |
| CDR3-H | 95-102 | 95-102 |

*The C-terminus of CDR1-H, when numbered using the Kabat numbering convention, varies between 32 and 34, depending on the length of the CDR.

[0170] The “EU numbering scheme” is generally used when referring to a residue in an antibody heavy chain constant region (e.g., as reported in Kabat et al., supra).

[0171] An “antibody fragment” comprises a portion of an intact antibody, such as the antigen-binding or variable region of an intact antibody. Antibody fragments include, for example, Fv fragments, Fab fragments, F(ab′)₂fragments, Fab′ fragments, scFv (sFv) fragments, and scFv-Fc fragments.

[0172] “Fv” fragments comprise a non-covalently-linked dimer of one heavy chain variable domain and one light chain variable domain.

[0173] “Fab” fragments comprise, in addition to the heavy and light chain variable domains, the constant domain of the light chain and the first constant domain (C_{H1}) of the heavy chain. Fab fragments may be generated, for example, by recombinant methods or by papain digestion of a full-length antibody.

[0174] “F(ab′)₂” fragments contain two Fab′ fragments joined, near the hinge region, by disulfide bonds. F(ab′)₂ fragments may be generated, for example, by recombinant methods or by pepsin digestion of an intact antibody. The F(ab′) fragments can be dissociated, for example, by treatment with β-mercaptoethanol.

[0175] “Single-chain Fv” or “sFv” or “scFv” antibody fragments comprise a V_{H} domain and a V_{L} domain in a single polypeptide chain. The V_{H} and V_{L} are generally linked by a peptide linker. See Plückthun A. (1994). In some embodiments, the linker is a (GGGGS)ₙ (SEQ ID NO: 5). In some embodiments, n=1, 2, 3, 4, 5, or 6. See Antibodies from Escherichia coli. In Rosenberg M. & Moore G. P. (Eds.), The Pharmacology of Monoclonal Antibodies vol. 113 (pp. 269-315). Springer-Verlag, New York, incorporated by reference in its entirety.

[0176] “scFv-Fc” fragments comprise an scFv attached to an Fc domain. For example, an Fc domain may be attached to the C-terminal of the scFv. The Fc domain may follow the V_{H} or V_{L}, depending on the orientation of the variable domains in the scFv (i.e., V_{H}-V_{L} or V_{L}-V_{H}). Any suitable Fc domain known in the art or described herein may be used. In some cases, the Fc domain comprises an IgG4 Fc domain.

[0177] The term “single domain antibody” refers to a molecule in which one variable domain of an antibody specifically binds to an antigen without the presence of the other variable domain. Single domain antibodies, and fragments thereof, are described in Arabi Ghahroudi et al., FEBS Letters, 1998, 414:521-526 and Muyldermans et al., Trends in Biochem. Sci., 2001, 26:230-245, each of which is incorporated by reference in its entirety.

[0178] A “monospecific RPP” is an RPP that comprises a binding site that specifically binds to a single epitope. An example of a monospecific RPP is a naturally occurring IgG molecule which, while divalent, recognizes the same epitope at each antigen-binding domain. The binding specificity may be present in any suitable valency.

[0179] A “polyspecific RPP” is an RPP that binds to more than one epitope. An example of a polyspecific RPP is a mixture of antibodies that bind to different serotypes of pneumococcal bacteria.

[0180] The term “monoclonal antibody” refers to an antibody from a population of substantially homogeneous antibodies. A population of substantially homogeneous antibodies comprises antibodies that are substantially similar and that bind the same epitope(s), except for variants that may normally arise during production of the monoclonal antibody. Such variants are generally present in only minor amounts. A monoclonal antibody is typically obtained by a process that includes the selection of a single antibody from a plurality of antibodies. For example, the selection process can be the selection of a unique clone from a plurality of clones, such as a pool of hybridoma clones, phage clones, yeast clones, bacterial clones, or other recombinant DNA clones. The selected antibody can be further altered, for example, to improve affinity for the target (“affinity maturation”), to humanize the antibody, to improve its production in cell culture, and/or to reduce its immunogenicity in a subject.

[0181] The term “polyclonal antibody” refers to a mixture of at least two monoclonal antibodies. Polyclonal antibodies may be either monospecific or polyspecific.

[0182] The term “chimeric antibody” refers to an antibody in which a portion of the heavy and/or light chain is derived from a particular source or species, while the remainder of the heavy and/or light chain is derived from a different source or species.

[0183] “Humanized” forms of non-human antibodies are chimeric antibodies that contain minimal sequence derived from the non-human antibody. A humanized antibody is generally a human antibody (recipient antibody) in which residues from one or more CDRs are replaced by residues from one or more CDRs of a non-human antibody (donor antibody). The donor antibody can be any suitable non-human antibody, such as a mouse, rat, rabbit, chicken, or non-human primate antibody having a desired specificity, affinity, or biological effect. In some instances, selected framework region residues of the recipient antibody are replaced by the corresponding framework region residues from the donor antibody. Humanized antibodies may also comprise residues that are not found in either the recipient antibody or the donor antibody. Such modifications may be made to further refine antibody function. For further details, see Jones et al., Nature, 1986, 321:522-525; Riechmann et al., Nature, 1988, 332:323-329; and Presta, Curr. Op. Struct. Biol., 1992, 2:593-596, each of which is incorporated by reference in its entirety.

[0184] A “human antibody” is one which possesses an amino acid sequence corresponding to that of an antibody produced by a human or a human cell, or derived from a non-human source that utilizes a human antibody repertoire or human antibody-encoding sequences (e.g., obtained from human sources or designed de novo). Human antibodies specifically exclude humanized antibodies.

[0185] An “isolated RPP” or “isolated nucleic acid” is an RPP or nucleic acid that has been separated and/or recovered from a component of its natural environment. Components of the natural environment may include enzymes, hormones, and other proteinaceous or nonproteinaceous materials. In some embodiments, an isolated RPP is purified to a degree sufficient to obtain at least 15 residues of N-terminal or internal amino acid sequence, for example by use of a spinning cup sequenator. In some embodiments, an isolated RPP is purified to homogeneity by gel electrophoresis (e.g., SDS-PAGE) under reducing or nonreducing conditions, with detection by Coomassie blue or silver stain. An isolated RPP includes an RPP in situ within recombinant cells, since at least one component of the RPP's natural environment is not present. In some aspects, an isolated RPP or isolated nucleic acid is prepared by at least one purification step. In some embodiments, an isolated RPP or isolated nucleic acid is purified to at least 80%, 85%, 90%, 95%, or 99% by weight. In some embodiments, an isolated RPP or isolated nucleic acid is purified to at least 80%, 85%, 90%, 95%, or 99% by volume. In some embodiments, an isolated RPP or isolated nucleic acid is provided as a solution comprising at least 85%, 90%, 95%, 98%, 99% to 100% RPP or nucleic acid by weight. In some embodiments, an isolated RPP or isolated nucleic acid is provided as a solution comprising at least 85%, 90%, 95%, 98%, 99% to 100% RPP or nucleic acid by volume.

[0186] “Affinity” refers to the strength of the sum total of non-covalent interactions between a single binding site of a molecule (e.g., an RPP) and its binding partner (e.g., an antigen or epitope). Unless indicated otherwise, as used herein, “affinity” refers to intrinsic binding affinity, which reflects a 1:1 interaction between members of a binding pair (e.g., RPP and antigen or epitope). The affinity of a molecule X for its partner Y can be represented by the dissociation equilibrium constant (K_{D}). The kinetic components that contribute to the dissociation equilibrium constant are described in more detail below. Affinity can be measured by common methods known in the art, including those described herein. Affinity can be determined, for example, using surface plasmon resonance (SPR) technology (e.g., BIACORE®) or biolayer interferometry (e.g., FORTEBIO®).

[0187] With regard to the binding of an RPP to a target molecule, the terms “bind,” “specific binding,” “specifically binds to,” “specific for,” “selectively binds,” and “selective for” a particular antigen (e.g., a polypeptide target) or an epitope on a particular antigen mean binding that is measurably different from a non-specific or non-selective interaction (e.g., with a non-target molecule). Specific binding can be measured, for example, by measuring binding to a target molecule and comparing it to binding to a non-target molecule. Specific binding can also be determined by competition with a control molecule that mimics the epitope recognized on the target molecule. In that case, specific binding is indicated if the binding of the RPP to the target molecule is competitively inhibited by the control molecule.

[0188] The term “k_{d}” (sec⁻¹), as used herein, refers to the dissociation rate constant of a particular ABP-antigen interaction. This value is also referred to as the k_{off} value.

[0189] The term “kₐ” (M⁻¹×sec⁻¹), as used herein, refers to the association rate constant of a particular ABP-antigen interaction. This value is also referred to as the kₒₙ value.

[0190] The term “K_{D}” (M), as used herein, refers to the dissociation equilibrium constant of a particular ABP-antigen interaction. K_{D}=k_{d}/kₐ.

[0191] The term “K_{A}” (M⁻¹), as used herein, refers to the association equilibrium constant of a particular ABP-antigen interaction. K_{A}=kₐ/k_{d}.

[0192] An “immunoconjugate” is an RPP conjugated to one or more heterologous molecule(s).

[0193] “Effector functions” refer to those biological activities mediated by the Fc region of an antibody, which activities may vary depending on the antibody isotype. Examples of antibody effector functions include C1q binding to activate complement dependent cytotoxicity (CDC), Fc receptor binding to activate antibody-dependent cellular cytotoxicity (ADCC), and antibody dependent cellular phagocytosis (ADCP).

[0194] When used herein in the context of two or more RPPs, the term “competes with” or “cross-competes with” indicates that the two or more RPPs compete for binding to an antigen (e.g., pneumococcus polysaccharide). In one exemplary assay, an antigen is coated on a surface and contacted with a first RPP against the antigen, after which a second RPP against the antigen is added. In another exemplary assay, a first RPP against an antigen is coated on a surface and contacted with the antigen, and then a second RPP against the antigen is added. If the presence of the first RPP against an antigen reduces binding of the second RPP, in either assay, then the RPPs compete. The term “competes with” also includes combinations of RPPs where one RPP reduces binding of another RPP, but where no competition is observed when the RPPs are added in the reverse order. However, in some embodiments, the first and second RPPs inhibit binding of each other, regardless of the order in which they are added. In some embodiments, one RPP reduces binding of another RPP to its antigen by at least 25%, at least 50%, at least 60%, at least 70%, at least 80%, at least 85%, at least 90%, or at least 95%. A skilled artisan can select the concentrations of the antibodies used in the competition assays based on the affinities of the RPPs for pneumococcus polysaccharide and the valency of the RPPs. The assays described in this definition are illustrative, and a skilled artisan can utilize any suitable assay to determine if antibodies compete with each other. Suitable assays are described, for example, in Cox et al., “Immunoassay Methods,” in Assay Guidance Manual [Internet], Updated Dec. 24, 2014 (www.ncbi.nlm.nih.gov/books/NBK92434/; accessed Sep. 29, 2015); Silman et al., Cytometry, 2001, 44:30-37; and Finco et al., J. Pharm. Biomed. Anal., 2011, 54:351-358; each of which is incorporated by reference in its entirety.

[0195] The term “epitope” means a portion of an antigen the specifically binds to an RPP or an ABP. Epitopes frequently consist of surface-accessible amino acid residues and/or sugar side chains and may have specific three-dimensional structural characteristics, as well as specific charge characteristics. Conformational and non-conformational epitopes are distinguished in that the binding to the former but not the latter may be lost in the presence of denaturing solvents. An epitope may comprise amino acid residues that are directly involved in the binding, and other amino acid residues, which are not directly involved in the binding. The epitope to which an RPP or an ABP binds can be determined using known techniques for epitope determination such as, for example, testing for RPP or an ABP binding to an antigen.

[0196] Percent “identity” between a polypeptide sequence and a reference sequence, is defined as the percentage of amino acid residues in the polypeptide sequence that are identical to the amino acid residues in the reference sequence, after aligning the sequences and introducing gaps, if necessary, to achieve the maximum percent sequence identity. Alignment for purposes of determining percent amino acid sequence identity can be achieved in various ways that are within the skill in the art, for instance, using publicly available computer software such as BLAST, BLAST-2, ALIGN, MEGALIGN (DNASTAR), CLUSTALW, CLUSTAL OMEGA, or MUSCLE software. Those skilled in the art can determine appropriate parameters for aligning sequences, including any algorithms needed to achieve maximal alignment over the full length of the sequences being compared.

[0197] A “conservative substitution” or a “conservative amino acid substitution,” refers to the substitution an amino acid with a chemically or functionally similar amino acid. Conservative substitution tables providing similar amino acids are well known in the art. By way of example, the groups of amino acids provided in TABLES 2-4 are, in some embodiments, considered conservative substitutions for one another.

TABLE 2
Selected groups of amino acids that are considered conservative
substitutions for one another, in certain embodiments.

| | |
|---|---|
| Acidic Residues | D and E |
| Basic Residues | K, R, and H |
| Hydrophilic Uncharged Residues | S, T, N, and Q |
| Aliphatic Uncharged Residues | G, A, V, L, and I |
| Non-polar Uncharged Residues | C, M, and P |
| Aromatic Residues | F, Y, and W |

TABLE 3
Additional selected groups of amino acids
that are considered conservative substitutions
for one another, in certain embodiments.

| | |
|---|---|
| Group 1 | A, S, and T |
| Group 2 | D and E |
| Group 3 | N and Q |
| Group 4 | R and K |
| Group 5 | I, L, and M |
| Group 6 | F, Y, and W |

TABLE 4
Further selected groups of amino acids that are
considered conservative substitutions for
one another, in certain embodiments.

| | |
|---|---|
| Group A | A and G |
| Group B | D and E |
| Group C | N and Q |
| Group D | R, K, and H |
| Group E | I, L, M, V |
| Group F | F, Y, and W |
| Group G | S and T |
| Group H | C and M |

[0198] Additional conservative substitutions may be found, for example, in Creighton, Proteins: Structures and Molecular Properties 2nd ed. (1993) W. H. Freeman & Co., New York, N.Y. An RPP generated by making one or more conservative substitutions of amino acid residues in a parent RPP is referred to as a “conservatively modified variant.”

[0199] The term “treating” (and variations thereof such as “treat” or “treatment”) refers to clinical intervention in an attempt to alter the natural course of a disease or condition in a subject in need thereof. Treatment can be performed both for prophylaxis and during the course of clinical pathology. Desirable effects of treatment include preventing occurrence or recurrence of disease, alleviation of symptoms, diminish of any direct or indirect pathological consequences of the disease, preventing reinfection or associated symptom, decreasing the rate of disease progression, amelioration or palliation of the disease state, and remission or improved prognosis. Improvements in any conditions can be readily assessed according to standard methods and techniques known in the art. The population of subjects treated by the method of the disease includes subjects suffering from the undesirable condition or disease, as well as subjects at risk for development of the condition or disease.

[0200] As used herein, the term “therapeutically effective amount” or “effective amount” refers to an amount of an RPP or pharmaceutical composition provided herein that, when administered to a subject, is effective to produces the desired effect for which it is administered. The exact dose or amount will depend on the purpose of the treatment, and will be ascertainable by one skilled in the art using known techniques (see, e.g., Lloyd (1999) The Art, Science and Technology of Pharmaceutical Compounding). A therapeutically effective amount can be a “prophylactically effective amount” as prophylaxis can be considered therapy. The term “sufficient amount” means an amount sufficient to produce a desired effect.

[0201] As used herein, the term “subject” means a mammalian subject. Exemplary subjects include humans, monkeys, dogs, cats, mice, rats, cows, horses, camels, goats, rabbits, and sheep. In certain embodiments, the subject is a human. In some embodiments the subject has a disease or condition that can be treated with an RPP provided herein. In some aspects, the disease or condition is a cancer. In some aspects, the disease or condition is a viral infection.

[0202] The term “package insert” is used to refer to instructions customarily included in commercial packages of therapeutic or diagnostic products (e.g., kits) that contain information about the indications, usage, dosage, administration, combination therapy, contraindications and/or warnings concerning the use of such therapeutic or diagnostic products.

[0203] The term “pharmaceutical composition” refers to a preparation which is in such form as to permit the biological activity of an active ingredient contained therein to be effective in treating a subject, and which contains no additional components which are unacceptably toxic to the subject.

[0204] The term “plasma cell” refers to white blood cells that secrete large volumes of antibodies. They are transported by the blood plasma and the lymphatic system. B cells (for example, either germinal center naive B cells or memory B cells) differentiate into plasma cells that produce antibody molecules closely modelled after the receptors of the precursor B cell. Once released into the blood and lymph, these antibody molecules bind to the target antigen (foreign substance) and initiate its neutralization or destruction. Terminally differentiated plasma cells express relatively few surface antigens, and do not express common pan-B cell markers, such as CD19 and CD20. Instead, plasma cells are identified through flow cytometry by their additional expression of CD138, CD78, and the Interleukin-6 receptor. In humans, CD27 is a good marker for plasma cells, naive B cells are CD27−, memory B-cells are CD27+ and plasma cells are CD27++. The surface antigen CD138 (syndecan-1) is expressed at high levels. Another important surface antigen is CD319 (SLAMF7). This antigen is expressed at high levels on normal human plasma cells. It is also expressed on malignant plasma cells in multiple myeloma. Compared with CD138, which disappears rapidly ex vivo, the expression of CD319 is considerably more stable.

[0205] The term “plasmablast” refers to antibody-secreting cells in the peripheral blood, which differentiate from activated B cells, such as memory B cells, upon stimulation with an antigen. The most immature blood cell that is considered of plasma cell lineage is the plasmablast. Plasmablasts secrete more antibodies than B cells, but less than plasma cells. They divide rapidly and are still capable of internalizing antigens and presenting them to T cells. A cell may stay in this state for several days, and then either die or irrevocably differentiate into a mature, fully differentiated plasma cell. Differentiation of mature B cells into plasma cells is dependent upon the transcription factors Blimp-1/PRDM1 and IRF4.

[0206] The term “memory B cell” refers to a B cell sub-type that are formed within germinal centers following primary infection and are important in generating an accelerated and more robust antibody-mediated immune response in the case of re-infection (also known as a secondary immune response). Memory B cells do not secrete antibody until activated by their specific antigen.

[0207] The term “naïve B cell” refers to a B cell that has not been exposed to an antigen. Once exposed to an antigen, the naïve B cell either becomes a memory B cell or a plasma cell that secretes antibodies specific to the antigen that was originally bound. Plasma cells do not last long in the circulation, this is in contrast to memory cells that last for very long periods of time.

[0208] The term “peripheral blood” refers to blood which travels through peripheral vessels. Peripheral blood is typically obtained by venipuncture (also called phlebotomy), or by finger prick for small quantities.

[0209] The term “plasma hyperimmune” refers to a polyclonal antibody preparation similar to intravenous immunoglobulin (IVIg), except that it is prepared from the plasma of donors with high titers of antibody against a specific organism or antigen. The term hyperimmune is often used interchangeably with the terms “hyperimmune gammaglobulin” and “hyperimmune globulin”. Some agents against which hyperimmune globulins are available include hepatitis B, rabies, tetanus toxin, varicella-zoster, etc. Administration of hyperimmune globulin provides “passive” immunity to the patient against an agent. This is in contrast to vaccines that provide “active” immunity. However, vaccines take much longer to achieve that purpose while hyperimmune globulin provides instant “passive” short-lived immunity.

[0210] The term “activity” refers to a quantitative measurement of an RPP or antibody against an antigen, vaccine, protein, epitope, cell, bacterium, or virus. Activity can be assessed using in vivo or in vitro methods.

[0211] The term “recombinant” refers to proteins that result from the expression of recombinant DNA within living cells. Recombinant DNA is the general name for a piece of DNA that has been created by the combination of at least two separate segments of DNA.

[0212] The term “neutralization” refers to the ability of specific antibodies to block the site(s) on viruses that they use to enter their target cell. The effect of a neutralizing antibody can be negligible even with large excesses of antibody production if they lack specificity to this antigen. The production of specific antibodies can be learned for a faster response at next exposition. The reduction or destruction of a homologous infectious agent can be partial or complete and can make it no longer infectious or pathogenic to other cells.

[0213] A “variant” of a polypeptide (e.g., an antibody) comprises an amino acid sequence wherein one or more amino acid residues are inserted into, deleted from and/or substituted into the amino acid sequence relative to the native polypeptide sequence, and retains essentially the same biological activity as the native polypeptide. The biological activity of the polypeptide can be measured using standard techniques in the art (for example, if the variant is an antibody, its activity may be tested by binding assays, as described herein). Variants of the invention include fragments, analogs, recombinant polypeptides, synthetic polypeptides, and/or fusion proteins.

[0214] A “derivative” of a polypeptide is a polypeptide (e.g., an antibody) that has been chemically modified, e.g., via conjugation to another chemical moiety such as, for example, polyethylene glycol, albumin (e.g., human serum albumin), phosphorylation, and glycosylation. Unless otherwise indicated, the term “antibody” includes, in addition to antibodies comprising two full-length heavy chains and two full-length light chains, derivatives, variants, fragments, and muteins thereof, examples of which are described below.

[0215] A nucleotide sequence is “operably linked” to a regulatory sequence if the regulatory sequence affects the expression (e.g., the level, timing, or location of expression) of the nucleotide sequence. A “regulatory sequence” is a nucleic acid that affects the expression (e.g., the level, timing, or location of expression) of a nucleic acid to which it is operably linked. The regulatory sequence can, for example, exert its effects directly on the regulated nucleic acid, or through the action of one or more other molecules (e.g., polypeptides that bind to the regulatory sequence and/or the nucleic acid). Examples of regulatory sequences include promoters, enhancers and other expression control elements (e.g., polyadenylation signals). Further examples of regulatory sequences are described in, for example, Goeddel, 1990, Gene Expression Technology: Methods in Enzymology 185, Academic Press, San Diego, Calif. and Baron et al., 1995, Nucleic Acids Res. 23:3605-06.

[0216] A “host cell” is a cell that can be used to express a nucleic acid, e.g., a nucleic acid of the invention. A host cell can be a prokaryote, for example, E. coli, or it can be a eukaryote, for example, a single-celled eukaryote (e.g., a yeast or other fungus), a plant cell (e.g., a tobacco or tomato plant cell), an animal cell (e.g., a human cell, a monkey cell, a hamster cell, a rat cell, a mouse cell, or an insect cell) or a hybridoma. Examples of host cells include CS-9 cells, the COS-7 line of monkey kidney cells (ATCC CRL 1651) (see Gluzman et al., 1981, Cell 23:175), L cells, C127 cells, 3T3 cells (ATCC CCL 163), Chinese hamster ovary (CHO) cells or their derivatives such as Veggie CHO and related cell lines which grow in serum-free media (see Rasmussen et al., 1998, Cytotechnology 28:31), HeLa cells, BHK (ATCC CRL 10) cell lines, the CV1/EBNA cell line derived from the African green monkey kidney cell line CV1 (ATCC CCL 70) (see McMahan et al., 1991, EMBO J. 10:2821), human embryonic kidney cells such as 293, 293 EBNA or MSR 293, human epidermal A431 cells, human Colo205 cells, other transformed primate cell lines, normal diploid cells, cell strains derived from in vitro culture of primary tissue, primary explants, HL-60, U937, HaK or Jurkat cells. Typically, a host cell is a cultured cell that can be transformed or transfected with a polypeptide-encoding nucleic acid, which can then be expressed in the host cell.

[0217] The phrase “recombinant host cell” can be used to denote a host cell that has been transformed or transfected with a nucleic acid to be expressed. A host cell also can be a cell that comprises the nucleic acid but does not express it at a desired level unless a regulatory sequence is introduced into the host cell such that it becomes operably linked with the nucleic acid. It is understood that the term host cell refers not only to the particular subject cell but to the progeny or potential progeny of such a cell. Because certain modifications may occur in succeeding generations due to, e.g., mutation or environmental influence, such progeny may not, in fact, be identical to the parent cell, but are still included within the scope of the term as used herein.

[0218] Other Interpretational Conventions

[0219] Ranges recited herein are understood to be shorthand for all of the values within the range, inclusive of the recited endpoints. For example, a range of 1 to 50 is understood to include any number, combination of numbers, or sub-range from the group consisting of 1, 2, 3, 4, 5, 6, 7, 8, 9, 10, 11, 12, 13, 14, 15, 16, 17, 18, 19, 20, 21, 22, 23, 24, 25, 26, 27, 28, 29, 30, 31, 32, 33, 34, 35, 36, 37, 38, 39, 40, 41, 42, 43, 44, 45, 46, 47, 48, 49, and 50.

[0220] Unless otherwise indicated, reference to a compound that has one or more stereocenters intends each stereoisomer, and all combinations of stereoisomers, thereof.

[0221] Recombinant Polyclonal Protein (RPP)

[0222] The present disclosure provides a RPP that specifically binds a SARS-CoV-2 antigen. The RPP comprises a plurality of ABPs specifically binding to one or more SARS-CoV-2 antigens. The SARS-CoV-2 antigen can be a SARS-CoV-2 receptor binding domain (RBD), SARS-CoV-2 spike S1, or other protein specific to SARS-CoV-2.

[0223] In some embodiments, the RPP binds an aitngen, wherein a. the antigen is a SARS-CoV-2 receptor binding domain (RBD) and the library comprises at least 100 RPPs each with a cognate pair of heavy chain CDR3 and light chain CDR3 sequences as shown in Table 5, optionally all the cognate pairs; orb. the antigen is a SARS-CoV-2 spike S1 and the library comprises at least 100 RPPs each with a cognate pair of heavy chain CDR3 and light chain CDR3 sequences as shown in Table 5, optionally all the cognate pairs; or c. a combination of a and b.

[0224] In some embodiments, the RPP comprises scFvs. In some embodiments, the RPP consists of scFvs. In some embodiments, the RPP comprises antibody fragments. In some embodiments, the RPP consists of antibody fragments. In some embodiments, the RPP comprises recombinant full-length antibodies. In some embodiments, the RPP consists of recombinant full-length antibodies. In some embodiments, the RPP comprises human antibodies. In some embodiments, the RPP comprises humanized antibodies. In some embodiments, the RPP comprises monospecific ABPs. In some embodiments, the RPP comprises bispecific ABPs. In some embodiments, the RPP consists of ABPs of a human IgG1 subtype.

[0225] In some embodiments, the RPP comprises antibody fragments. The RPP can be a Fab fragment, a F(ab′)₂ fragment an Fv fragment, or a combination thereof. A Fab fragment is a monovalent fragment having the V_{L}, V_{H}, C_{L} and C_{H1} domains; a F(ab′)₂ fragment is a bivalent fragment having two Fab fragments linked by a disulfide bridge at the hinge region; a Fd fragment has the V_{H} and C_{H1} domains; an Fv fragment has the V_{L} and V_{H} domains of a single arm of an antibody; and a dAb fragment has a V_{H} domain, a V_{L} domain, or an antigen-binding fragment of a V_{H} or V_{L} domain (U.S. Pat. No. 6,846,634, 6,696,245, US App. Pub. No. 05/0202512, 04/0202995, 04/0038291, 04/0009507, 03/0039958, Ward et al., Nature 341:544-546, 1989).

[0226] Naturally occurring immunoglobulin chains exhibit the same general structure of relatively conserved framework regions (FR) joined by three hypervariable regions, also called complementarity determining regions or CDRs. From N-terminus to C-terminus, both light and heavy chains comprise the domains FR1, CDR1, FR2, CDR2, FR3, CDR3 and FR4. The assignment of amino acids to each domain is in accordance with the definitions of Kabat et al. in Sequences of Proteins of Immunological Interest, 5th Ed., US Dept. of Health and Human Services, PHS, NIH, NIH Publication no. 91-3242, 1991.

[0227] In some embodiments, the RPP is humanized antibodies. A humanized antibody has a sequence that differs from the sequence of an antibody derived from a non-human species by one or more amino acid substitutions, deletions, and/or additions, such that the humanized antibody is less likely to induce an immune response, and/or induces a less severe immune response, as compared to the non-human species antibody, when it is administered to a human subject. In one embodiment, certain amino acids in the framework and constant domains of the heavy and/or light chains of the non-human species antibody are mutated to produce the humanized antibody. In another embodiment, the constant domain(s) from a human antibody are fused to the variable domain(s) of a non-human species. In another embodiment, one or more amino acid residues in one or more CDR sequences of a non-human antibody are changed to reduce the likely immunogenicity of the non-human antibody when it is administered to a human subject, wherein the changed amino acid residues either are not critical for immunospecific binding of the antibody to its antigen, or the changes to the amino acid sequence that are made are conservative changes, such that the binding of the humanized antibody to the antigen is not significantly worse than the binding of the non-human antibody to the antigen. Examples of how to make humanized antibodies may be found in U.S. Pat. Nos. 6,054,297, 5,886,152 and 5,877,293.

[0228] Fragments or analogs of antibodies can be readily prepared by those of ordinary skill in the art following the teachings of this specification and using techniques well-known in the art. Preferred amino- and carboxy-termini of fragments or analogs occur near boundaries of functional domains. Structural and functional domains can be identified by comparison of the nucleotide and/or amino acid sequence data to public or proprietary sequence databases. Computerized comparison methods can be used to identify sequence motifs or predicted protein conformation domains that occur in other proteins of known structure and/or function. Methods to identify protein sequences that fold into a known three-dimensional structure are known. See, e.g., Bowie et al., 1991, Science 253:164.

[0229] An RPP can also be any synthetic or genetically engineered protein. For example, antibody fragments include isolated fragments consisting of the light chain variable region, “Fv” fragments consisting of the variable regions of the heavy and light chains, recombinant single chain polypeptide molecules in which light and heavy variable regions are connected by a peptide linker (scFv proteins).

[0230] Another form of an antibody fragment is a peptide comprising one or more complementarity determining regions (CDRs) of an antibody. CDRs (also termed “minimal recognition units”, or “hypervariable region”) can be incorporated into a molecule either covalently or noncovalently to make it an antigen binding protein. CDRs can be obtained by constructing polynucleotides that encode the CDR of interest. Such polynucleotides are prepared, for example, by using the polymerase chain reaction to synthesize the variable region using mRNA of antibody producing cells as a template (see, for example, Larrick et al., Methods: A Companion to Methods in Enzymology 2:106, 1991; Courtenay Luck, “Genetic Manipulation of Monoclonal Antibodies,” in Monoclonal Antibodies: Production, Engineering and Clinical Application, Ritter et al. (eds.), page 166 (Cambridge University Press 1995); and Ward et al., “Genetic Manipulation and Expression of Antibodies,” in Monoclonal Antibodies: Principles and Applications, Birch et al., (eds.), page 137 (Wiley Liss, Inc. 1995).

[0231] The variable region domains of RPPs can be any naturally occurring variable domain or an engineered version thereof. By engineered version is meant a variable region domain that has been created using recombinant DNA engineering techniques. Such engineered versions include those created, for example, from a specific antibody variable region by insertions, deletions, or changes in or to the amino acid sequences of the specific antibody. Particular examples include engineered variable region domains containing at least one CDR and optionally one or more framework amino acids from a first antibody and the remainder of the variable region domain from a second antibody.

[0232] The variable region domain may be covalently attached at a C terminal amino acid to at least one other antibody domain or a fragment thereof. Thus, for example, a V_{H} domain that is present in the variable region domain may be linked to an immunoglobulin CH1 domain, or a fragment thereof. Similarly, a V_{L} domain may be linked to a CK domain or a fragment thereof. In this way, for example, the antibody may be a Fab fragment wherein the antigen binding domain contains associated V_{H} and V_{L} domains covalently linked at their C termini to a CH1 and CK domain, respectively. The CH1 domain may be extended with further amino acids, for example to provide a hinge region or a portion of a hinge region domain as found in a Fab′ fragment, or to provide further domains, such as antibody CH2 and CH3 domains.

[0233] The RPP can be ABPs comprising, e.g., the cognate pairs of heavy and light chain CDR3 sequence disclosed herein. For example, CDRs may be incorporated into known antibody framework regions (IgG1, IgG2, etc.), or conjugated to a suitable vehicle to enhance the half-life thereof. Suitable vehicles include, but are not limited to Fc, polyethylene glycol (PEG), albumin, transferrin, and the like. These and other suitable vehicles are known in the art. Such conjugated CDR peptides may be in monomeric, dimeric, tetrameric, or other form. In one embodiment, one or more water-soluble polymer is bonded at one or more specific position, for example at the amino terminus, of a binding agent.

[0234] In certain embodiments, the RPP comprises one or more water soluble polymer attachments, including, but not limited to, polyethylene glycol, polyoxyethylene glycol, or polypropylene glycol. See, e.g., U.S. Pat. Nos. 4,640,835, 4,496,689, 4,301,144, 4,670,417, 4,791,192 and 4,179,337. In certain embodiments, a derivative binding agent comprises one or more of monomethoxy-polyethylene glycol, dextran, cellulose, or other carbohydrate based polymers, poly-(N-vinyl pyrrolidone)-polyethylene glycol, propylene glycol homopolymers, a polypropylene oxide/ethylene oxide co-polymer, polyoxyethylated polyols (e.g., glycerol) and polyvinyl alcohol, as well as mixtures of such polymers. In certain embodiments, one or more water-soluble polymer is randomly attached to one or more side chains. In certain embodiments, PEG can act to improve the therapeutic capacity for a binding agent, such as an antibody. Certain such methods are discussed, for example, in U.S. Pat. No. 6,133,426, which is hereby incorporated by reference for any purpose.

[0235] An RPP can have, for example, the structure of a naturally occurring immunoglobulin. An “immunoglobulin” is a tetrameric molecule. In a naturally occurring immunoglobulin, each tetramer is composed of two identical pairs of polypeptide chains, each pair having one “light” (about 25 kDa) and one “heavy” chain (about 50-70 kDa). The amino-terminal portion of each chain includes a variable region of about 100 to 110 or more amino acids primarily responsible for antigen recognition. The carboxy-terminal portion of each chain defines a constant region primarily responsible for effector function. Human light chains are classified as kappa and lambda light chains. Heavy chains are classified as mu, delta, gamma, alpha, or epsilon, and define the antibody's isotype as IgM, IgD, IgG, IgA, and IgE, respectively. Within light and heavy chains, the variable and constant regions are joined by a “J” region of about 12 or more amino acids, with the heavy chain also including a “D” region of about 10 more amino acids. See generally, Fundamental Immunology Ch. 7 (Paul, W., ed., 2nd ed. Raven Press, N.Y. (1989)) (incorporated by reference in its entirety for all purposes). The variable regions of each light/heavy chain pair form the antibody binding site such that an intact immunoglobulin has two binding sites.

[0236] Different RPPs may bind to different domains of disease targets or act by different mechanisms of action. As indicated herein inter alia, the domain regions are designated such as to be inclusive of the group, unless otherwise indicated. For example, amino acids 4-12 refers to nine amino acids: amino acids at positions 4, and 12, as well as the seven intervening amino acids in the sequence. Other examples include antigen binding proteins that inhibit binding of a pathogen to its target cell, i.e., neutralizing activity. An antigen binding protein need not completely inhibit a binding to target cell to find use in the present invention.

[0237] The RPPs describe herein can include an Fc region, e.g., a dimer Fc polypeptide. One suitable Fc polypeptide, described in PCT application WO 93/10151 (hereby incorporated by reference), is a single chain polypeptide extending from the N-terminal hinge region to the native C-terminus of the Fc region of a human IgG1 antibody. Another useful Fc polypeptide is the Fc mutein described in U.S. Pat. No. 5,457,035 and in Baum et al., 1994, EMBO J. 13:3992-4001. The amino acid sequence of this mutein is identical to that of the native Fc sequence presented in WO 93/10151, except that amino acid 19 has been changed from Leu to Ala, amino acid 20 has been changed from Leu to Glu, and amino acid 22 has been changed from Gly to Ala. The mutein exhibits reduced affinity for Fc receptors.

[0238] Antigen-binding fragments of RPPs of the invention can be produced by conventional techniques. Examples of such fragments include, but are not limited to, Fab and F(ab′)₂ fragments. Antibody fragments and derivatives produced by genetic engineering techniques also are contemplated.

[0239] Additional embodiments include chimeric antibodies, e.g., humanized versions of non-human (e.g., murine) monoclonal antibodies. Such humanized antibodies may be prepared by known techniques, and offer the advantage of reduced immunogenicity when the antibodies are administered to humans. In one embodiment, a humanized antibody comprises the variable domain of a murine antibody (or all or part of the antigen binding site thereof) and a constant domain derived from a human antibody. Alternatively, a humanized antibody fragment may comprise the antigen binding site of a murine antibody and a variable domain fragment (lacking the antigen-binding site) derived from a human antibody. Procedures for the production of chimeric and further engineered antibodies include those described in Riechmann et al., 1988, Nature 332:323, Liu et al., 1987, Proc. Nat. Acad. Sci. USA 84:3439, Larrick et al., 1989, Bio/Technology 7:934, and Winter et al., 1993, TIPS 14:139. In one embodiment, the chimeric antibody is a CDR grafted antibody. Techniques for humanizing antibodies are discussed in, e.g., U.S. Pat. Nos. 5,869,619, 5,225,539, 5,821,337, 5,859,205, 6,881,557, Padlan et al., 1995, FASEB J. 9:133-39, and Tamura et al., 2000, J. Immunol. 164:1432-41.

[0240] Procedures have been developed for generating human or partially human antibodies in non-human animals. For example, mice in which one or more endogenous immunoglobulin genes have been inactivated by various means have been prepared. Human immunoglobulin genes have been introduced into the mice to replace the inactivated mouse genes. Antibodies produced in the animal incorporate human immunoglobulin polypeptide chains encoded by the human genetic material introduced into the animal. In one embodiment, a non-human animal, such as a transgenic mouse, is immunized with a vaccine, such that antibodies directed against the vaccine antigen pare generated in the animal.

[0241] Examples of techniques for production and use of transgenic animals for the production of human or partially human antibodies are described in U.S. Pat. Nos. 5,814,318, 5,569,825, and 5,545,806, Davis et al., 2003, Production of human antibodies from transgenic mice in Lo, ed. Antibody Engineering: Methods and Protocols, Humana Press, NJ:191-200, Kellermann et al., 2002, Curr Opin Biotechnol. 13:593-97, Russel et al., 2000, Infect Immun. 68:1820-26, Gallo et al., 2000, Eur J Immun. 30:534-40, Davis et al., 1999, Cancer Metastasis Rev. 18:421-25, Green, 1999, J Immunol Methods. 231:11-23, Jakobovits, 1998, Advanced Drug Delivery Reviews 31:33-42, Green et al., 1998, J Exp Med. 188:483-95, Jakobovits A, 1998, Exp. Opin. Invest. Drugs. 7:607-14, Tsuda et al., 1997, Genomics. 42:413-21, Mendez et al., 1997, Nat Genet. 15:146-56, Jakobovits, 1994, Curr Biol. 4:761-63, Arbones et al., 1994, Immunity. 1:247-60, Green et al., 1994, Nat Genet. 7:13-21, Jakobovits et al., 1993, Nature. 362:255-58, Jakobovits et al., 1993, Proc Natl Acad Sci USA. 90:2551-55. Chen, J., M. Trounstine, F. W. Alt, F. Young, C. Kurahara, J. Loring, D. Huszar. Inter'l Immunol. 5 (1993): 647-656, Choi et al., 1993, Nature Genetics 4: 117-23, Fishwild et al., 1996, Nature Biotech. 14: 845-51, Harding et al., 1995, Annals of the New York Academy of Sciences, Lonberg et al., 1994, Nature 368: 856-59, Lonberg, 1994, Transgenic Approaches to Human Monoclonal Antibodies in Handbook of Experimental Pharmacology 113: 49-101, Lonberg et al., 1995, Internal Review of Immunology 13: 65-93, Neuberger, 1996, Nature Biotechnology 14: 826, Taylor et al., 1992, Nucleic Acids Res. 20: 6287-95, Taylor et al., 1994, Inter'l Immunol. 6: 579-91, Tomizuka et al., 1997, Nature Genetics 16: 133-43, Tomizuka et al., 2000, Pro. Nat'l Acad. Sci. USA 97: 722-27, Tuaillon et al., 1993, Pro. Nat'l Acad. Sci. USA 90: 3720-24, and Tuaillon et al., 1994, J. Immunol. 152: 2912-20.

[0242] RPPs of the invention can comprise any constant region known in the art. The light chain constant region can be, for example, a kappa- or lambda-type light chain constant region, e.g., a human kappa- or lambda-type light chain constant region. The heavy chain constant region can be, for example, an alpha-, delta-, epsilon-, gamma-, or mu-type heavy chain constant regions, e.g., a human alpha-, delta-, epsilon-, gamma-, or mu-type heavy chain constant region. In one embodiment, the light or heavy chain constant region is a fragment, derivative, variant, or mutein of a naturally occurring constant region.

[0243] Techniques are known for deriving an antibody of a different subclass or isotype from an antibody of interest, i.e., subclass switching. Thus, IgG antibodies may be derived from an IgM antibody, for example, and vice versa. Such techniques allow the preparation of new antibodies that possess the antigen-binding properties of a given antibody (the parent antibody), but also exhibit biological properties associated with an antibody isotype or subclass different from that of the parent antibody. Recombinant DNA techniques may be employed. Cloned DNA encoding particular antibody polypeptides may be employed in such procedures, e.g., DNA encoding the constant domain of an antibody of the desired isotype. See also Lantto et al., 2002, Methods Mol. Biol. 178:303-16.

[0244] Single chain antibodies (scFv) may be formed by linking heavy and light chain variable domain (Fv region) fragments via an amino acid bridge (short peptide linker, e.g., a synthetic sequence of amino acid residues), resulting in a single polypeptide chain. Such single-chain Fvs (scFvs) have been prepared by fusing DNA encoding a peptide linker between DNAs encoding the two variable domain polypeptides (V_{L} and V_{H}). The resulting polypeptides can fold back on themselves to form antigen-binding monomers, or they can form multimers (e.g., dimers, trimers, or tetramers), depending on the length of a flexible linker between the two variable domains (Kortt et al., 1997, Prot. Eng. 10:423; Kortt et al., 2001, Biomol. Eng. 18:95-108, Bird et al., 1988, Science 242:423-26 and Huston et al., 1988, Proc. Natl. Acad. Sci. USA 85:5879-83). By combining different V_{L} and V_{H}-comprising polypeptides, one can form multimeric scFvs that bind to different epitopes (Kriangkum et al., 2001, Biomol. Eng. 18:31-40). Techniques developed for the production of single chain antibodies include those described in U.S. Pat. No. 4,946,778; Bird, 1988, Science 242:423; Huston et al., 1988, Proc. Natl. Acad. Sci. USA 85:5879; Ward et al., 1989, Nature 334:544, de Graaf et al., 2002, Methods Mol Biol. 178:379-87.

[0245] An RPP, e.g., ABPs, according to the invention may have a binding affinity for antigen target of less than or equal to 5×10⁻⁷M, less than or equal to 1×10⁻⁷M, less than or equal to 0.5×10⁻⁷M, less than or equal to 1×10⁻⁸M, less than or equal to 1×10⁻⁹M, less than or equal to 1×10⁻¹⁰M, less than or equal to 1×10⁻¹¹M, or less than or equal to 1×10⁻¹²M.

[0246] The affinity of an RPP, as well as the extent to which the RPP inhibits binding, can be determined by one of ordinary skill in the art using conventional techniques, for example those described by Scatchard et al. (Ann. N.Y. Acad. Sci. 51:660-672 (1949)) or by surface plasmon resonance (SPR; BIAcore, Biosensor, Piscataway, N.J.). For surface plasmon resonance, target molecules are immobilized on a solid phase and exposed to ligands in a mobile phase running along a flow cell. If ligand binding to the immobilized target occurs, the local refractive index changes, leading to a change in SPR angle, which can be monitored in real time by detecting changes in the intensity of the reflected light. The rates of change of the SPR signal can be analyzed to yield apparent rate constants for the association and dissociation phases of the binding reaction. The ratio of these values gives the apparent equilibrium constant (affinity) (see, e.g., Wolff et al., Cancer Res. 53:2560-65 (1993)).

[0247] Sequences of RPP

[0248] CDR3H (heavy chain immunoglobulin) and CDR3L (light chain immunoglobulin) polypeptide sequences of recombinant antibodies generated using the methods described herein are provided in the sequence listing. A summary of the sequences is provided in TABLE 5. ABPs of the RPP provided herein can comprise a cognate pair of heavy chain CDR3 and light chain CDR3 sequences as shown in Table 5, optionally all the cognate pairs.

[0249] In some embodiments, the RPP specifically binds to a SARS-CoV-2 receptor binding domain (RBD) and comprises ABPs each with a cognate pair of heavy chain CDR3 and light chain CDR3 sequences as shown in Table 5, optionally all the cognate pairs. In particular, the heavy chain CDR3 can comprise a sequence selected from SEQ ID NO: 2, 4, 6, through 4760 (even numbers) or SEQ ID NO: 5084, 5086, 5088, through 6630 (even numbers). The light chain CDR3 can comprise a sequence selected from SEQ ID NO: 1, 3, 5, through 4759 (odd numbers) or SEQ ID NO: 5083, 5085, 5087, through 6629 (odd numbers).

[0250] In some embodiments, the RPP specifically binds to SARS-CoV-2 spike S1 and comprises ABPs each with a cognate pair of heavy chain CDR3 and light chain CDR3 sequences as shown in Table 5, optionally all the cognate pairs. In particular the heavy chain CDRs can comprise a sequence selected from SEQ ID NO: 4762, 4764, 4766, through 5082 (even numbers) or SEQ ID NO: 6632, 6634, 6636, through 8390 (even numbers). The light chain CDR3 can comprise a sequence selected from 4761, 4763, 4765, through 5081 (odd numbers) or 6631, 6633, 6635, through 8389 (odd numbers).

[0251] In some embodiments, the RPP is recombinantly produced using sequences derived from plasma cells or plasmablasts from at least one donor injected with the antigen or infected with SARS CoV-2. In some embodiments, the RPP is recombinantly produced using sequences derived from plasma cells or plasmablasts from at least one donor injected with the antigen or infected with SARS CoV-2. and the activity of the library of RPPs exceeds by at least tenfold a serum titer activity of the donor against the antigen. In some embodiments, the activity is measured by an in vitro pathogen neutralization assay or an in vitro binding to antigen assay or an in vivo efficacy assay.

TABLE 5
CDR3 heavy and CDR3 light chain sequences

| SEQ ID NO. | Description |
|---|---|
| 1, 3, 5, through 4759 | Antibodies from human convalescent donors-flow sorted using SARS- |
| (odd numbers) | CoV-2 receptor binding domain (RBD)-light chain CDR3 sequences |
| 2, 4, 6, through 4760 | Antibodies from human convalescent donors-flow sorted using SARS- |
| (even numbers) | CoV-2 receptor binding domain (RBD)-heavy chain CDR3 sequences |
| 4761, 4763, 4765, | Antibodies from human convalescent donors-flow sorted using SARS- |
| through 5081 (odd | CoV-2 spike S1-light chain CDR3 sequences |
| numbers) | |
| 4762, 4764, 4766, | Antibodies from human convalescent donors-flow sorted using SARS- |
| through 5082 (even | CoV-2 spike S1-heavy chain CDR3 sequences |
| numbers) | |
| 5083, 5085, 5087, | Antibodies from Trianni mice-flow sorted using SARS-CoV-2 receptor |
| through 6629 (odd | binding domain (RBD)-light chain CDR3 sequences |
| numbers) | |
| 5084, 5086, 5088, | Antibodies from Trianni mice-flow sorted using SARS-CoV-2 receptor |
| through 6630 (even | binding domain (RBD)-heavy chain CDR3 sequences |
| numbers) | |
| 6631, 6633, 6635, | Antibodies from Trianni mice-flow sorted using SARS-CoV-2 spike |
| through 8389 (odd | S1-light chain CDR3 sequences |
| numbers) | |
| 6632, 6634, 6636, | Antibodies from Trianni mice-flow sorted using SARS-CoV-2 spike |
| through 8390 (even | S1-heavy chain CDR3 sequences |
| numbers) | |

[0252] In some embodiments, the RPP includes an ABP comprising cognate pairs of the heavy and light chain variable regions. In some embodiments, the ABP comprises CDR3 sequences disclosed herein. In some embodiments, the ABP comprises a heavy chain CDR3 having a sequence selected from SEQ ID Nos: 2, 4, 6, through 8390 (even numbers) and a light chain CDR3 has a sequence selected from SEQ ID Nos: 1, 3, 5, through 8389 (odd numbers). In some embodiments, the ABP comprises a heavy chain CDR3 having a sequence selected from SEQ ID Nos: 2, 4, 6, through 4760 (even numbers) and a light chain CDR3 has a sequence selected from SEQ ID Nos: 1, 3, 5, through 4759 (odd numbers). In some embodiments, the ABP comprises a heavy chain CDR3 having a sequence selected from SEQ ID Nos: 4762, 4764, 4766, through 5082 (even numbers) and a light chain CDR3 has a sequence selected from SEQ ID Nos: 4761, 4763, 4765, through 5081 (odd numbers). In some embodiments, the ABP comprises a heavy chain CDR3 having a sequence selected from SEQ ID Nos: 5084, 5086, 5088, through 6630 (even numbers) and a light chain CDR3 has a sequence selected from SEQ ID Nos: 5083, 5085, 5087, through 6629 (odd numbers). In some embodiments, the ABP comprises a heavy chain CDR3 having a sequence selected from SEQ ID Nos: 6632, 6634, 6636, through 8390 (even numbers) and a light chain CDR3 has a sequence selected from SEQ ID Nos: 6631, 6633, 6635, through 8389 (odd numbers). In some embodiments, the ABP comprises a heavy chain CDR3 having a sequence selected from SEQ ID Nos: 2, 4, 6, through 5082 (even numbers) and a light chain CDR3 has a sequence selected from SEQ ID Nos: 1, 3, 5, through 5081 (odd numbers).

[0253] In some embodiments, the ABP comprises a heavy chain CDR3 having the sequence of SEQ ID NO: [n+1] and a light chain CDR3 has the sequence of SEQ ID NO: [n], wherein n is an odd number from 1 to 8389. In some embodiments, the ABP comprises a heavy chain CDR3 having the sequence of SEQ ID NO: [n+1] and a light chain CDR3 has the sequence of SEQ ID NO: [n], wherein n is an odd number from 1 to 4759. In some embodiments, the ABP comprises a heavy chain CDR3 having the sequence of SEQ ID NO: [n+1] and a light chain CDR3 has the sequence of SEQ ID NO: [n], wherein n is an odd number from 4761 to 5081. In some embodiments, the ABP comprises a heavy chain CDR3 having the sequence of SEQ ID NO: [n+1] and a light chain CDR3 has the sequence of SEQ ID NO: [n], wherein n is an odd number from 5083 to 6629. In some embodiments, the ABP comprises a heavy chain CDR3 having the sequence of SEQ ID NO: [n+1] and a light chain CDR3 has the sequence of SEQ ID NO: [n], wherein n is an odd number from 6631 to 8389.

[0254] In some embodiments, the ABP comprises a heavy chain CDR1 having the sequence of GFTX₁X₂X₃X₄X₅ (SEQ ID NO: 8409). In some embodiments, the ABP comprises a heavy chain CDR1 having the sequence of GFT[V/F][S/T][S/F/T][N/S/Y][Y/A/G] (SEQ ID NO: 8391). In some embodiments, the ABP comprises a heavy chain CDR1 having a sequence selected from the group consisting of: GFTVS[S/F]NY (SEQ ID NO: 8392), GFTFTSSA (SEQ ID NO: 8393), GFTFSSYG (SEQ ID NO: 8394), (SEQ ID NO: 8395), and CFTVSTNY (SEQ ID NO: 8396).

[0255] In some embodiments, the ABP comprises a heavy chain CDR2 having the sequence of IX₁X₂X₃GX₄X₅ (SEQ ID NO: 8397). In some embodiments, the ABP comprises a heavy chain CDRs having the sequence of I[Y/W/S][S/G/Y][G/S/D]G[S/N/SN][T/K] (SEQ ID NO: 8398). In some embodiments, the RPP comprises a heavy chaing CDR2 having a sequence selected from the group consisting of: IYSGGST (SEQ ID NO: 8399), IWGSGNT (SEQ ID NO: 8400), ISYDGSNK (SEQ ID NO: 8401), IYSGGST (SEQ ID NO: 8402), and IYSGGST (SEQ ID NO: 8403).

[0256] In some embodiments, the ABP comprises a heavy chain CDR3 having the sequence of ARDL[G/S/A][P/A/S][R/A]G[G/Y][I/F]DY (SEQ ID NO: 8404), AAPYCSSTSCHDAFDI (SEQ ID NO: 8405), AKHGYSYGYWLGYFDY (SEQ ID NO: 8406), AR[D/E][C/T/L][L/M][G/V][Y/I][G/P]SMDV (SEQ ID NO: 8407), and ARGHWEYYFDY (SEQ ID NO: 8408)

[0257] In some embodiments, the ABP compirses (i) a heavy chain CDR1 having the sequence of GFTVS[S/F]NY (SEQ ID NO: 8392), a heavy chain CDR2 having the sequence of IYSGGST (SEQ ID NO: 8399), and a heavy chain CDR3 having the sequence of ARDL[G/S/A][P/A/S][R/A]G[G/Y][I/F]DY (SEQ ID NO: 8404); (ii) a heavy chain CDR1 having the sequence of GFTFTSSA (SEQ ID NO: 8393), a heavy chain CDR2 having the sequence of IWGSGNT (SEQ ID NO: 8400), and a heavy chain CDR3 having the sequence of AAPYCSSTSCHDAFDI (SEQ ID NO: 8405); (iii) a heavy chain CDR1 having the sequence of GFTFSSYG (SEQ ID NO: 8394), a heavy chain CDR2 having the sequence of ISYDGSNK (SEQ ID NO: 8401), and a heavy chain CDR3 having the sequence of AKHGYSYGYWLGYFDY (SEQ ID NO: 8406); (iv) a heavy chain CDR1 having the sequence of GFTVSSNY (SEQ ID NO: 8395), a heavy chain CDR2 having the sequence of IYSGGST (SEQ ID NO: 8402), and a heavy chain CDR3 having the sequence of AR[D/E][C/T/L][L/M][G/V][Y/I][G/P]SMDV (SEQ ID NO: 8407); or (v) a heavy chain CDR1 having the sequence of CFTVSTNY (SEQ ID NO: 8396), a heavy chain CDR2 having the sequence of IYSGGST (SEQ ID NO: 8403), and a heavy chain CDR3 having the sequence of ARGHWEYYFDY (SEQ ID NO: 8408).

[0258] An oligopeptide or polypeptide is within the scope of the invention if it has an amino acid sequence that is at least 75%, 76%, 77%, 78%, 79%, 80%, 81%, 82%, 83%, 84%, 85%, 86%, 87%, 88%, 89%, 90%, 91%, 92%, 93%, 94%, 95%, 96%, 97%, 98% or 99% identical to least one of the CDR sequences provided herein.

[0259] In some embodiments, the RPP comprises about 10, 100, 500, 1,000, 5,000, 10,000, 50,000 or more than 100,000 distinct ABPs, each having a unique sequence. In some embodiments, the RPP comprises at least 10, 100, 500, 1,000, 5,000, 10,000, 20,000, 30,000, 40,000, 50,000 or more than 100,000 distinct ABPs, each having a unique sequence.

[0260] In some embodiments, the RPP has a binding titer to a SARS-CoV-2 antigen at least 50 times higher than antibodies in a sample obtained from one or more donor exposed to the antigen. The binding titer can be measured by any of the methods known in the art. For example, the binding titer can be measured by anti-SARS-CoV-2- ELISA. In some embodiments, the binding titer of the RPP is at least 100, 200, 300, 400, 500, 600, 700, 800, 900, or 1000 times higher than antibodies in a sample obtained from one or more donor exposed to the SARS-CoV-2 antigen. The sample can be a plasma sample.

[0261] In some embodiments, the RPP has a SARS-CoV-2 neutralization titer at least 50 times higher than antibodies in a sample obtained from one or more donor exposed to the antigen. The neutralization titer can be measured by any of the methods known in the art. For example, the neutralization titer can be measured by an in vitro assay. In some embodiments, the neutralization titer of the RPP is at least 100, 200, 300, 400, 500, 600, 700, 800, 900, or 1000 times higher than antibodies in a sample obtained from one or more donor exposed to the SARS-CoV-2 antigen. The sample can be a plasma sample.

[0262] In some embodiments, the RPP comprises ABPs selected based on their activity. For example, the RPP comprises ABPs selected based on their binding or neutralization activity against

[0263] COVID-19. In some embodiments, the ABP contains a mix of RPPs selected for their activity against different types or variants of COVID-19.

[0264] Nucleic Acids

[0265] In one aspect, the present invention provides isolated nucleic acid molecules. The nucleic acids comprise, for example, polynucleotides that encode all or part of an RPP, for example, one or both chains of an antibody of the invention, or a fragment, derivative, mutein, or variant thereof, polynucleotides sufficient for use as hybridization probes, PCR primers or sequencing primers for identifying, analyzing, mutating or amplifying a polynucleotide encoding a polypeptide, anti-sense nucleic acids for inhibiting expression of a polynucleotide, and complementary sequences of the foregoing. The nucleic acids can be any length. They can be, for example, 5, 10, 15, 20, 25, 30, 35, 40, 45, 50, 75, 100, 125, 150, 175, 200, 250, 300, 350, 400, 450, 500, 750, 1,000, 1,500, 3,000, 5,000 or more nucleotides in length, and/or can comprise one or more additional sequences, for example, regulatory sequences, and/or be part of a larger nucleic acid, for example, a vector. The nucleic acids can be single-stranded or double-stranded and can comprise RNA and/or DNA nucleotides, and artificial variants thereof (e.g., peptide nucleic acids).

[0266] Polynucleotides encoding antibody polypeptides (e.g., heavy or light chain, variable domain only, CDRs only, or full length) can be isolated from B cells, plasma cells, or plasmablasts of a subject that has been exposed to an antigen, e.g., by being infected by virus or immunized with a vaccine. The nucleic acid can be isolated by conventional procedures such as polymerase chain reaction (PCR) or methods described herein (e.g., single cell OE-RT-PCR).

[0267] Polypeptide sequences of the CDR3 from the variable regions of the heavy and light chain variable regions are shown herein. The skilled artisan will appreciate that, due to the degeneracy of the genetic code, each of the polypeptide sequences disclosed herein is encoded by a large number of other nucleic acid sequences. The present invention provides each degenerate nucleotide sequence encoding each RPP of the invention.

[0268] Methods for hybridizing nucleic acids are well-known in the art. See, e.g., Curr. Prot. in Mol. Biol., John Wiley & Sons, N.Y. (1989), 6.3.1-6.3.6. As defined herein, a moderately stringent hybridization condition uses a prewashing solution containing 5× sodium chloride/sodium citrate (SSC), 0.5% SDS, 1.0 mM EDTA (pH 8.0), hybridization buffer of about 50% formamide, 6×SSC, and a hybridization temperature of 55° C. (or other similar hybridization solutions, such as one containing about 50% formamide, with a hybridization temperature of 42° C.), and washing conditions of 60° C., in 0.5×SSC, 0.1% SDS. A stringent hybridization condition hybridizes in 6×SSC at 45° C., followed by one or more washes in 0.1×SSC, 0.2% SDS at 68° C. Furthermore, one of skill in the art can manipulate the hybridization and/or washing conditions to increase or decrease the stringency of hybridization such that nucleic acids comprising nucleotide sequences that are at least 65, 70, 75, 80, 85, 90, 95, 98, or 99% identical to each other typically remain hybridized to each other. The basic parameters affecting the choice of hybridization conditions and guidance for devising suitable conditions are set forth by, for example, Sambrook, Fritsch, and Maniatis (1989, Molecular Cloning: A Laboratory Manual, Cold Spring Harbor Laboratory Press, Cold Spring Harbor, N.Y., chapters 9 and 11; and Curr. Prot. in Mol. Biol. 1995, Ausubel et al., eds., John Wiley & Sons, Inc., sections 2.10 and 6.3-6.4), and can be readily determined by those having ordinary skill in the art based on, for example, the length and/or base composition of the DNA.

[0269] Changes can be introduced by mutation into a nucleic acid, thereby leading to changes in the amino acid sequence of a polypeptide (e.g., an RPP) that it encodes. Mutations can be introduced using any technique known in the art. In one embodiment, one or more particular amino acid residues are changed using, for example, a site-directed mutagenesis protocol. In another embodiment, one or more randomly selected residues are changed using, for example, a random mutagenesis protocol. However, it is made, a mutant polypeptide can be expressed and screened for a desired property (e.g., binding to a virus).

[0270] In another aspect, the present invention provides nucleic acid molecules that are suitable for use as primers or hybridization probes for the detection of nucleic acid sequences of the invention. A nucleic acid molecule of the invention can comprise only a portion of a nucleic acid sequence encoding a full-length polypeptide of the invention, for example, a fragment that can be used as a probe or primer or a fragment encoding an active portion (e.g., a virus binding portion) of a polypeptide of the invention.

[0271] Probes based on the sequence of a nucleic acid of the invention can be used to detect the nucleic acid or similar nucleic acids, for example, transcripts encoding a polypeptide of the invention. The probe can comprise a label group, e.g., a radioisotope, a fluorescent compound, an enzyme, or an enzyme co-factor. Such probes can be used to identify a cell that expresses the polypeptide

[0272] In another aspect, the present invention provides libraries of nucleic acids that encode for RPP or a variant or derivative thereof, derived from B cells, plasmablasts, and plasma cells. These libraries of nucleic acids are generated by isolating plasmablasts and plasma cells into single-cell reaction containers, wherein they are lysed and antibody-specific nucleic acids are purified or captured, for example on solid supports such as beads. The present invention provides methods for performing capture of transcripts from millions of single cells in parallel. Capture of transcripts is followed by amplification of nucleic acids that encode heavy and light chain immunoglobulins, and subsequent linkage of said nucleic acids into libraries of fused constructs that encode both heavy and light chain immunoglobulins. In such libraries the native pairing of heavy and light chain immunoglobulins, as originally found in the input B cells, plasmablasts, and plasma cells, is maintained. Such methods are performed in parallel on millions of single cells, such that the resulting library of fused heavy and light chain immunoglobulin nucleic acids comprises natively paired sequences for millions of single cells. Such methods are described elsewhere (Adler et al., Mabs 9, 1282-1996, 2017; WO2020/223573 which are incorporated by reference in its entirety herein).

[0273] Vectors and Host Cells

[0274] The present invention provides vectors, each vector comprising a nucleic acid encoding a polypeptide of the invention or a portion thereof. Examples of vectors include, but are not limited to, plasmids, viral vectors, non-episomal mammalian vectors and expression vectors, for example, recombinant expression vectors.

[0275] In another aspect of the present invention, expression vectors containing the nucleic acid molecules and polynucleotides of the present invention are also provided, and host cells transformed with such vectors, and methods of producing the polypeptides are also provided. The term “expression vector” refers to a plasmid, phage, virus or vector for expressing a polypeptide from a polynucleotide sequence. Vectors for the expression of the polypeptides contain at a minimum sequence required for vector propagation and for expression of the cloned insert. An expression vector comprises a transcriptional unit comprising an assembly of (1) a genetic element or elements having a regulatory role in gene expression, for example, promoters or enhancers, (2) a sequence that encodes polypeptides and proteins to be transcribed into mRNA and translated into protein, and (3) appropriate transcription initiation and termination sequences. These sequences may further include a selection marker. Vectors suitable for expression in host cells are readily available and the nucleic acid molecules are inserted into the vectors using standard recombinant DNA techniques. Such vectors can include promoters which function in specific cells or tissues, and viral vectors for the expression of polypeptides in targeted human or animal cells.

[0276] The recombinant expression vectors of the invention can comprise a nucleic acid of the invention in a form suitable for expression of the nucleic acid in a host cell. The recombinant expression vectors include one or more regulatory sequences, selected on the basis of the host cells to be used for expression, which is operably linked to the nucleic acid sequence to be expressed. Regulatory sequences include those that direct constitutive expression of a nucleotide sequence in many types of host cells (e.g., SV40 early gene enhancer, Rous sarcoma virus promoter and cytomegalovirus promoter), those that direct expression of the nucleotide sequence only in certain host cells (e.g., tissue-specific regulatory sequences, see Voss et al., 1986, Trends Biochem. Sci. 11:287, Maniatis et al., 1987, Science 236:1237, incorporated by reference herein in their entireties), and those that direct inducible expression of a nucleotide sequence in response to particular treatment or condition (e.g., the metallothionin promoter in mammalian cells and the tet-responsive and/or streptomycin responsive promoter in both prokaryotic and eukaryotic systems (see id.). It will be appreciated by those skilled in the art that the design of the expression vector can depend on such factors as the choice of the host cell to be transformed, the level of expression of protein desired, etc. The expression vectors of the invention can be introduced into host cells to thereby produce proteins or peptides, including fusion proteins or peptides, encoded by nucleic acids as described herein.

[0277] The invention further provides methods of making polypeptides, e.g., RPP. A variety of other expression/host systems may be utilized. Vector DNA can be introduced into prokaryotic or eukaryotic systems via conventional transformation or transfection techniques. These systems include but are not limited to microorganisms such as bacteria (for example, E. coli) transformed with recombinant bacteriophage, plasmid or cosmid DNA expression vectors; yeast transformed with yeast expression vectors; insect cell systems infected with virus expression vectors (e.g., baculovirus); plant cell systems transfected with virus expression vectors (e.g., cauliflower mosaic virus, CaMV; tobacco mosaic virus, TMV) or transformed with bacterial expression vectors (e.g., Ti or pBR322 plasmid); or animal cell systems. Mammalian cells useful in recombinant protein production include but are not limited to VERO cells, HeLa cells, Chinese hamster ovary (CHO) cell lines, or their derivatives such as Veggie CHO and related cell lines which grow in serum-free media (see Rasmussen et al., 1998, Cytotechnology 28:31) or CHO strain DX-B11, which is deficient in DHFR (see Urlaub et al., 1980, Proc. Natl. Acad. Sci. USA 77:4216-20) COS cells such as the COS-7 line of monkey kidney cells (ATCC CRL 1651) (see Gluzman et al., 1981, Cell 23:175), W138, BHK, HepG2, 3T3 (ATCC CCL 163), RIN, MDCK, A549, PC12, K562, L cells, C127 cells, BHK (ATCC CRL 10) cell lines, the CV1/EBNA cell line derived from the African green monkey kidney cell line CV1 (ATCC CCL 70) (see McMahan et al., 1991, EMBO J. 10:2821), human embryonic kidney cells such as 293, 293 EBNA or MSR 293, human epidermal A431 cells, human Colo205 cells, other transformed primate cell lines, normal diploid cells, cell strains derived from in vitro culture of primary tissue, primary explants, HL-60, U937, HaK or Jurkat cells. Mammalian expression allows for the production of secreted or soluble polypeptides which may be recovered from the growth medium.

[0278] For stable transfection of mammalian cells, it is known that, depending upon the expression vector and transfection technique used, only a small fraction of cells may integrate the foreign DNA into their genome. In order to identify and select these integrants, a gene that encodes a selectable marker (e.g., for resistance to antibiotics) is generally introduced into the host cells along with the gene of interest. Once such cells are transformed with vectors that contain selectable markers as well as the desired expression cassette, the cells can be allowed to grow in an enriched media before they are switched to selective media, for example. The selectable marker is designed to allow growth and recovery of cells that successfully express the introduced sequences. Resistant clumps of stably transformed cells can be proliferated using tissue culture techniques appropriate to the cell line employed. An overview of expression of recombinant proteins is found in Methods of Enzymology, v. 185, Goeddell, D. V., ed., Academic Press (1990). Preferred selectable markers include those which confer resistance to drugs, such as G418, hygromycin and methotrexate. Cells stably transfected with the introduced nucleic acid can be identified by drug selection (e.g., cells that have incorporated the selectable marker gene will survive, while the other cells die), among other methods.

[0279] The transformed cells can be cultured under conditions that promote expression of the polypeptide, and the polypeptide can be recovered by conventional protein purification procedures (as defined above).

[0280] In some cases, such as in expression using prokaryotic systems, the expressed polypeptides of this invention may need to be “refolded” and oxidized into a proper tertiary structure and disulfide linkages generated in order to be biologically active. Refolding can be accomplished using a number of procedures well known in the art. Such methods include, for example, exposing the solubilized polypeptide to a pH usually above 7 in the presence of a chaotropic agent. The selection of chaotrope is similar to the choices used for inclusion body solubilization; however, a chaotrope is typically used at a lower concentration. Exemplary chaotropic agents are guanidine and urea. In most cases, the refolding/oxidation solution will also contain a reducing agent plus its oxidized form in a specific ratio to generate a particular redox potential which allows for disulfide shuffling to occur for the formation of cysteine bridges. Some commonly used redox couples include cysteine/cystamine, glutathione/dithiobisGSH, cupric chloride, dithiothreitol DTT/dithiane DTT, and 2-mercaptoethanol (bME)/dithio-bME. In many instances, a co-solvent may be used to increase the efficiency of the refolding. Commonly used cosolvents include glycerol, polyethylene glycol of various molecular weights, and arginine.

[0281] In addition, the polypeptides can be synthesized in solution or on a solid support in accordance with conventional techniques. Various automatic synthesizers are commercially available and can be used in accordance with known protocols. See, for example, Stewart and Young, Solid Phase Peptide Synthesis, 2d.Ed., Pierce Chemical Co. (1984); Tam et al., J Am Chem Soc, 105:6442, (1983); Merrifield, Science 232:341-347 (1986); Barany and Merrifield, The Peptides, Gross and Meienhofer, eds, Academic Press, New York, 1-284; Barany et al., Int J Pep Protein Res, 30:705-739 (1987).

[0282] The polypeptides and proteins of the present invention can be purified according to protein purification techniques well known to those of skill in the art. These techniques involve, at one level, the crude fractionation of the proteinaceous and non-proteinaceous fractions. Having separated the peptide polypeptides from other proteins, the peptide or polypeptide of interest can be further purified using chromatographic and electrophoretic techniques to achieve partial or complete purification (or purification to homogeneity). The term “purified polypeptide” as used herein, is intended to refer to a composition, isolatable from other components, wherein the polypeptide is purified to any degree relative to its naturally-obtainable state. A purified polypeptide therefore also refers to a polypeptide that is free from the environment in which it may naturally occur. Generally, “purified” will refer to a polypeptide composition that has been subjected to fractionation to remove various other components, and which composition substantially retains its expressed biological activity. Where the term “substantially purified” is used, this designation will refer to a peptide or polypeptide composition in which the polypeptide or peptide forms the major component of the composition, such as constituting about 50%, about 60%, about 70%, about 80%, about 85%, or about 90% or more of the proteins in the composition.

[0283] Various techniques suitable for use in purification are well known to those of skill in the art. These include, for example, precipitation with ammonium sulphate, PEG, antibodies (immunoprecipitation) and the like or by heat denaturation, followed by centrifugation; chromatography such as affinity chromatography (Protein-A columns), ion exchange, gel filtration, reverse phase, hydroxylapatite, hydrophobic interaction chromatography, isoelectric focusing, gel electrophoresis, and combinations of these techniques. As is generally known in the art, it is believed that the order of conducting the various purification steps may be changed, or that certain steps may be omitted, and still result in a suitable method for the preparation of a substantially purified polypeptide. Exemplary purification steps are provided in the Examples below.

[0284] Various methods for quantifying the degree of purification of polypeptide are known to those of skill in the art in light of the present disclosure. These include, for example, determining the specific binding activity of an active fraction, or assessing the amount of peptide or polypeptide within a fraction by SDS/PAGE analysis. A preferred method for assessing the purity of a polypeptide fraction is to calculate the binding activity of the fraction, to compare it to the binding activity of the initial extract, and to thus calculate the degree of purification, herein assessed by a “− fold purification number.” The actual units used to represent the amount of binding activity are, of course, be dependent upon the particular assay technique chosen to follow the purification and whether or not the polypeptide or peptide exhibits a detectable binding activity.

[0285] In some aspects, the present invention includes libraries of antibody-encoding nucleic acid vectors for site-directed integration into mammalian genomes. Such vectors include plasmids, retroviruses, and lentivirus. These libraries of vectors encode libraries of antibody sequences, which are then be used to engineer mammalian cells for production of RPPs. The libraries of nucleic acid vectors may include 10, 100, 1,000, 10,000, or more than 100,000 different antibody-encoding sequences. The sequences are derived from plasmablasts and plasma cells. These libraries of nucleic acids are generated by isolating plasmablasts and plasma cells into single-cell reaction containers, wherein they are lysed and antibody-specific nucleic acids are purified or captured, for example on solid supports such as beads. The present invention provides methods for performing capture of transcripts from millions of single cells in parallel. Capture of transcripts is followed by amplification of nucleic acids that encode heavy and light chain immunoglobulins, and subsequent linkage of said nucleic acids into libraries of fused constructs that encode both heavy and light chain immunoglobulins. In such libraries the native pairing of heavy and light chain immunoglobulins, as originally found in the input plasmablasts and plasma cells, is maintained. Such methods are performed in parallel on millions of single cells, such that the resulting library of fused heavy and light chain immunoglobulin nucleic acids comprises natively paired sequences for millions of single cells. These paired fused amplicons are then engineered into full-length antibody constructs using Gibson Assembly, restriction endonucleases, or other recombinant DNA techniques. Engineering into full-length antibody constructs is performed on the full library en masse, such that the antibody sequence content and antibody sequence counts of the library are essentially maintained throughout the process. In some aspects, the library of expression vectors is engineered in two steps, such that the scFv amplicon is subcloned into an intermediate vector, and then a second round of Gibson Assembly, restriction digestion, or other recombinant technique is used to engineer additional domains of the antibody into the linker of the scFv. The method is described in U.S. Pat. No. 9,422,547, which is incorporated by reference in its entirety herein. The native pairing of heavy and light chain immunoglobulins is essentially maintained throughout the process of engineering into full-length expression vector libraries. The vectors are designed in various orientations, for example, two separate promoters drive expression of heavy and light chain immunoglobulins, or one promoter drives expression of both heavy and light chain immunoglobulins, and a translational skip motif is used to separately translate the heavy and light chain immunoglobulins into separate polypeptides. In some embodiments, the expression vectors comprise sequences for site-directed integration into mammalian production cells, for example, CRISPR-Cas9, Flp-In, Cre/Lox, or zinc finger recombination methods. Site-directed integration ensures that each mammalian production cell encodes a single antibody sequence, and decreases variability in expression levels between single production cells.

[0286] In another aspect, the present disclosure provides a host cell or a library of host cells, each comprising a polynucleotide encoding the RPP described herein. In some embodiments, the host cell comprises a vector or comprises a polynucleotide stably integrated into its genome. In some embodiments, the host cell comprises a polynucleotide encoding a RPP stably integrated into the genome using a Flp recombinase recognition target (FRT) landing pad or a similar method known in the art. In some embodiments, the host cell is a mammalian or prolaryotic cell. In some embodiments, the host cell is a human cell or a yeast cell. In some embodiments, the host cell is CHO cell.

[0287] In some embodiments, the host cell comprises an expression vector or integrated polynucleotide for production of RPPs. In some embodiments, a library of host cells can be used produce a RPP described herein. In some embodiments, a library of host cells comprise cells selected based on their production yields or neutralization or binding titers of RPP produced by them.

[0288] Methods of Producing RPP

[0289] The RPP can be purified from host cells that comprises a gene encoding the RPP by elution of filtered supernatant of host cell culture fluid using a Heparin HP column, using a salt gradient, or with protein A resin.

[0290] Fully human monoclonal antibodies may be generated by any number of techniques with which those having ordinary skill in the art will be familiar. Such methods include, but are not limited to, Epstein Barr Virus (EBV) transformation of human peripheral blood cells (e.g., containing B lymphocytes), in vitro immunization of human B-cells, fusion of spleen cells from immunized transgenic mice carrying inserted human immunoglobulin genes, isolation from human immunoglobulin V region phage libraries, or other procedures as known in the art and based on the disclosure herein. For example, fully human monoclonal antibodies may be obtained from transgenic mice that have been engineered to produce specific human antibodies in response to antigenic challenge. Methods for obtaining fully human antibodies from transgenic mice are described, for example, by Green et al., Nature Genet. 7:13, 1994; Lonberg et al., Nature 368:856, 1994; Taylor et al., Int. Immun. 6:579, 1994; U.S. Pat. No. 5,877,397; Bruggemann et al., 1997 Curr. Opin. Biotechnol. 8:455-58; Jakobovits et al., 1995 Ann. N. Y. Acad. Sci. 764:525-35. In this technique, elements of the human heavy and light chain locus are introduced into strains of mice derived from embryonic stem cell lines that contain targeted disruptions of the endogenous heavy chain and light chain loci (see also Bruggemann et al., Curr. Opin. Biotechnol. 8:455-58 (1997)). For example, human immunoglobulin transgenes may be mini-gene constructs, or transloci on yeast artificial chromosomes, which undergo B-cell-specific DNA rearrangement and hypermutation in the mouse lymphoid tissue. Fully human monoclonal antibodies may be obtained by immunizing the transgenic mice, which may then produce human antibodies specific for the antigen target or targets. Lymphoid cells of the immunized transgenic mice can be used to produce human antibody-secreting hybridomas according to the methods described herein.

[0291] Another method for generating human antibodies of the invention includes immortalizing human peripheral blood cells by EBV transformation. See, e.g., U.S. Pat. No. 4,464,456. Such an immortalized B-cell line (or lymphoblastoid cell line) producing an RPP that specifically binds to target or targets can be identified by immunodetection methods as provided herein, for example, an ELISA, and then isolated by standard cloning techniques. The stability of the lymphoblastoid cell line producing an RPP may be improved by fusing the transformed cell lines with a murine myeloma to produce a mouse-human hybrid cell line according to methods known in the art (see, e.g., Glasky et al., Hybridoma 8:377-89 (1989)). Still another method to generate human RPPs is in vitro immunization, which includes priming human splenic B-cells with antigen targets, followed by fusion of primed with a heterohybrid fusion partner. See, e.g., Boerner et al., 1991 J. Immunol. 147:86-95.

[0292] In certain embodiments, B-cells that are producing a RPP are selected and the light chain and heavy chain variable regions are cloned from the B-cell according to molecular biology techniques known in the art (WO 92/02551; U.S. Pat. No. 5,627,052; Babcook et al., Proc. Natl. Acad. Sci. USA 93:7843-48 (1996)) and described herein. B-cells from an immunized animal may be isolated from the spleen, lymph node, or peripheral blood sample by selecting a cell that is producing an antibody that specifically binds to to the antigen target. B-cells may also be isolated from humans, for example, from a peripheral blood sample.

[0293] Methods for detecting single B-cells that are producing an antibody with the desired specificity are well known in the art, for example, by plaque formation, fluorescence-activated cell sorting, in vitro stimulation followed by detection of specific antibody, and the like. Methods for selection of specific antibody-producing B-cells include, for example, preparing a single cell suspension of B-cells in soft agar that contains the antigen target. Binding of the specific antibodies produced by the B-cell to the antigen results in the formation of a complex, which may be visible as an immunoprecipitate.

[0294] In some embodiments, specific antibody-producing B-cells are selected by using a method that allows identification natively paired antibodies. For example, a method described in Adler et al., A natively paired antibody library yields drug leads with higher sensitivity and specificity than a randomly paired antibody library, MAbs (2018), which is incorporated by reference in its entirety herein, can be employed. The method combines microfluidic technology, molecular genomics, yeast single-chain variable fragment (scFv) display, fluorescence-activated cell sorting (FACS) and deep sequencing. In short, B cells can be isolated from immunized animals and then pooled. The B cells are encapsulated into droplets with oligo-dT beads and a lysis solution, and mRNA-bound beads are purified from the droplets, and then injected into a second emulsion with an OE-RT-PCR amplification mix that generates DNA amplicons that encode scFv with native pairing of heavy and light chain Ig. Libraries of natively paired amplicons are then electroporated into yeast for scFv display. FACS is used to identify high affinity scFv. Finally, deep antibody sequencing can be used to identify all clones in the pre- and post-sort scFv libraries.

[0295] After the B-cells producing the desired antibody are selected, the specific antibody genes may be cloned by isolating and amplifying DNA or mRNA according to methods known in the art and described herein.

[0296] The methods for obtaining antibodies of the invention can also adopt various phage display technologies known in the art. See, e.g., Winter et al., 1994 Annu. Rev. Immunol. 12:433-55; Burton et al., 1994 Adv. Immunol. 57:191-280. Human or murine immunoglobulin variable region gene combinatorial libraries may be created in phage vectors that can be screened to select Ig fragments (Fab, Fv, sFv, or multimers thereof) that bind specifically to the RPP or variant or fragment thereof. See, e.g., U.S. Pat. No. 5,223,409; Huse et al., 1989 Science 246:1275-81; Sastry et al., Proc. Natl. Acad. Sci. USA 86:5728-32 (1989); Alting-Mees et al., Strategies in Molecular Biology 3:1-9 (1990); Kang et al., 1991 Proc. Natl. Acad. Sci. USA 88:4363-66; Hoogenboom et al., 1992 J. Molec. Biol. 227:381-388; Schlebusch et al., 1997 Hybridoma 16:47-52 and references cited therein. For example, a library containing a plurality of polynucleotide sequences encoding Ig variable region fragments may be inserted into the genome of a filamentous bacteriophage, such as M13 or a variant thereof, in frame with the sequence encoding a phage coat protein. A fusion protein may be a fusion of the coat protein with the light chain variable region domain and/or with the heavy chain variable region domain. According to certain embodiments, immunoglobulin Fab fragments may also be displayed on a phage particle (see, e.g., U.S. Pat. No. 5,698,426).

[0297] In one embodiment, in a hybridoma the variable regions of a gene expressing a monoclonal antibody of interest are amplified using nucleotide primers. These primers may be synthesized by one of ordinary skill in the art, or may be purchased from commercially available sources. (See, e.g., Stratagene (La Jolla, Calif.), which sells primers for mouse and human variable regions including, among others, primers for V_{Ha}, V_{Hb}, V_{Hc}, V_{Hd}, C_{H1}, V_{L} and C_{L} regions.) These primers may be used to amplify heavy or light chain variable regions, which may then be inserted into vectors such as ImmunoZAP™H or ImmunoZAP™L (Stratagene), respectively. These vectors may then be introduced into E. coli, yeast, or mammalian-based systems for expression. Large amounts of a single-chain protein containing a fusion of the V_{H} and V_{L} domains may be produced using these methods (see Bird et al., Science 242:423-426, 1988).

[0298] Once cells producing antibodies according to the invention have been obtained using any of the above-described immunization and other techniques, the specific antibody genes may be cloned by isolating and amplifying DNA or mRNA therefrom according to standard procedures as described herein. The antibodies produced therefrom may be sequenced and the CDRs identified and the DNA coding for the CDRs may be manipulated as described previously to generate other antibodies according to the invention.

[0299] RPP of the present invention preferably have activity in the cell-based assays described herein and/or the in vivo assay described herein and/or bind to one or more of the antigens described herein. Accordingly, such binding agents can be identified using the assays described herein.

[0300] Other antibodies according to the invention may be obtained by conventional immunization and cell fusion procedures as described herein and known in the art.

[0301] Molecular evolution of the complementarity determining regions (CDRs) in the center of the antibody binding site also has been used to isolate antibodies with increased affinity, for example, antibodies having increased affinity for c-erbB-2, as described by Schier et al., 1996, J. Mol. Biol. 263:551.

[0302] Human, partially human, or humanized antibodies are suitable for many applications, particularly those involving administration of the antibody to a human subject, other types of antigen binding proteins. The non-human antibodies of the invention can be, for example, derived from any antibody-producing animal, such as mouse, rat, rabbit, goat, donkey, or non-human primate (such as monkey (e.g., cynomologous or rhesus monkey) or ape (e.g., chimpanzee)). Non-human antibodies of the invention can be used, for example, in in vitro and cell-culture based applications, or any other application where an immune response to the antibody of the invention does not occur, is insignificant, can be prevented, is not a concern, or is desired. In one embodiment, a non-human antibody of the invention is administered to a non-human subject. In another embodiment, the non-human antibody does not elicit an immune response in the non-human subject. In another embodiment, the non-human antibody is from the same species as the non-human subject, e.g., a mouse antibody of the invention is administered to a mouse. An antibody from a particular species can be made by, for example, immunizing an animal of that species with the desired immunogen or using an artificial system for generating antibodies of that species (e.g., a bacterial or phage display-based system for generating antibodies of a particular species), or by converting an antibody from one species into an antibody from another species by replacing, e.g., the constant region of the antibody with a constant region from the other species, or by replacing one or more amino acid residues of the antibody so that it more closely resembles the sequence of an antibody from the other species. In one embodiment, the antibody is a chimeric antibody comprising amino acid sequences derived from antibodies from two or more different species.

[0303] ABPs may be prepared, and screened for desired properties, by any of a number of conventional techniques. Certain of the techniques involve isolating a nucleic acid encoding a polypeptide chain (or portion thereof) of an RPP of interest, and manipulating the nucleic acid through recombinant DNA technology. The nucleic acid may be fused to another nucleic acid of interest, or altered (e.g., by mutagenesis or other conventional techniques) to add, delete, or substitute one or more amino acid residues, for example. Furthermore, the antigen binding proteins may be purified from cells that naturally express them (e.g., an antibody can be purified from a hybridoma that produces it), or produced in recombinant expression systems, using any technique known in the art. See, for example, Monoclonal Antibodies, Hybridomas: A New Dimension in Biological Analyses, Kennet et al. (eds.), Plenum Press, New York (1980); and Antibodies: A Laboratory Manual, Harlow and Land (eds.), Cold Spring Harbor Laboratory Press, Cold Spring Harbor, N.Y., (1988).

[0304] Any expression system known in the art can be used to make the recombinant polypeptides of the invention. Expression systems are detailed comprehensively above. In general, host cells are transformed with a recombinant expression vector that comprises DNA encoding a desired polypeptide. Among the host cells that may be employed are prokaryotes, yeast or higher eukaryotic cells. Prokaryotes include gram negative or gram-positive organisms, for example E. coli or Bacilli. Higher eukaryotic cells include insect cells and established cell lines of mammalian origin. Examples of suitable mammalian host cell lines include the COS-7 line of monkey kidney cells (ATCC CRL 1651) (Gluzman et al., 1981, Cell 23:175), L cells, 293 cells, C127 cells, 3T3 cells (ATCC CCL 163), Chinese hamster ovary (CHO) cells, HeLa cells, BHK (ATCC CRL 10) cell lines, and the CVI/EBNA cell line derived from the African green monkey kidney cell line CVI (ATCC CCL 70) as described by McMahan et al., 1991, EMBO J. 10: 2821. Appropriate cloning and expression vectors for use with bacterial, fungal, yeast, and mammalian cellular hosts are described by Pouwels et al. (Cloning Vectors: A Laboratory Manual, Elsevier, N.Y., 1985).

[0305] Production cell lines for monoclonal antibodies (mAbs) are typically produced by randomly inserting expression constructs into a mammalian production cell genome, for example, a CHO genome (Rita Costa et al., 2010). However, this canonical method produces cell lines with multiple copies of mAb inserted into the CHO genome. If the polyclonal antibody construct libraries were randomly inserted into the CHO genome, many clones would express multiple antibodies, which would result in frequent non-native pairing between heavy and light chain Ig. Additionally, different genome locations have different transcriptional activity levels (Kito et al., 2002), which could result in heterogeneous, inconsistent and/or unstable bioproduction. Thus, in some aspects the current invention provides a CHO cell line with a Flp recombinase recognition target (FRT) landing pad stably engineered into the genome. Such site-directed genome integration cell lines are then used for stable expression of RPP.

[0306] It will be appreciated that an antibody of the present invention may have at least one amino acid substitution, providing that the antibody retains binding specificity. Therefore, modifications to the antibody structures are encompassed within the scope of the invention. These may include amino acid substitutions, which may be conservative or non-conservative that do not destroy the binding capability of an antibody comprising the RPP. Conservative amino acid substitutions may encompass non-naturally occurring amino acid residues, which are typically incorporated by chemical peptide synthesis rather than by synthesis in biological systems. These include peptidomimetics and other reversed or inverted forms of amino acid moieties. A conservative amino acid substitution may also involve a substitution of a native amino acid residue with a normative residue such that there is little or no effect on the polarity or charge of the amino acid residue at that position.

[0307] Non-conservative substitutions may involve the exchange of a member of one class of amino acids or amino acid mimetics for a member from another class with different physical properties (e.g. size, polarity, hydrophobicity, charge). Such substituted residues may be introduced into regions of the human antibody that are homologous with non-human antibodies, or into the non-homologous regions of the molecule.

[0308] Moreover, one skilled in the art may generate test variants containing a single amino acid substitution at each desired amino acid residue. The variants can then be screened using activity assays known to those skilled in the art. Such variants could be used to gather information about suitable variants. For example, if one discovered that a change to a particular amino acid residue resulted in destroyed, undesirably reduced, or unsuitable activity, variants with such a change may be avoided. In other words, based on information gathered from such routine experiments, one skilled in the art can readily determine the amino acids where further substitutions should be avoided either alone or in combination with other mutations.

[0309] A skilled artisan will be able to determine suitable variants of the polypeptide as set forth herein using well-known techniques. In certain embodiments, one skilled in the art may identify suitable areas of the molecule that may be changed without destroying activity by targeting regions not believed to be important for activity. In certain embodiments, one can identify residues and portions of the molecules that are conserved among similar polypeptides. In certain embodiments, even areas that may be important for biological activity or for structure may be subject to conservative amino acid substitutions without destroying the biological activity or without adversely affecting the polypeptide structure.

[0310] Additionally, one skilled in the art can review structure-function studies identifying residues in similar polypeptides that are important for activity or structure. In view of such a comparison, one can predict the importance of amino acid residues in a protein that correspond to amino acid residues which are important for activity or structure in similar proteins. One skilled in the art may opt for chemically similar amino acid substitutions for such predicted important amino acid residues.

[0311] One skilled in the art can also analyze the three-dimensional structure and amino acid sequence in relation to that structure in similar polypeptides. In view of such information, one skilled in the art may predict the alignment of amino acid residues of an antibody with respect to its three-dimensional structure. In certain embodiments, one skilled in the art may choose not to make radical changes to amino acid residues predicted to be on the surface of the protein, since such residues may be involved in important interactions with other molecules.

[0312] A number of scientific publications have been devoted to the prediction of secondary structure. See Moult J., Curr. Op. in Biotech., 7(4):422-427 (1996), Chou et al., Biochem., 13(2):222-245 (1974); Chou et al., Biochem., 113(2):211-222 (1974); Chou et al., Adv. Enzymol. Relat. Areas Mol. Biol., 47:45-148 (1978); Chou et al., Ann. Rev. Biochem., 47:251-276 and Chou et al., Biophys. J., 26:367-384 (1979). Moreover, computer programs are currently available to assist with predicting secondary structure. One method of predicting secondary structure is based upon homology modeling. For example, two polypeptides or proteins which have a sequence identity of greater than 30%, or similarity greater than 40% often have similar structural topologies. The recent growth of the protein structural database (PDB) has provided enhanced predictability of secondary structure, including the potential number of folds within a polypeptide's or protein's structure. See Holm et al., Nucl. Acid. Res., 27(1):244-247 (1999). It has been suggested (Brenner et al., Curr. Op. Struct. Biol., 7(3):369-376 (1997)) that there are a limited number of folds in a given polypeptide or protein and that once a critical number of structures have been resolved, structural prediction will become dramatically more accurate.

[0313] Additional methods of predicting secondary structure include “threading” (Jones, D., Curr. Opin. Struct. Biol., 7(3):377-87 (1997); Sippl et al., Structure, 4(1):15-19 (1996)), “profile analysis” (Bowie et al., Science, 253:164-170 (1991); Gribskov et al., Meth. Enzym., 183:146-159 (1990); Gribskov et al., Proc. Nat. Acad. Sci., 84(13):4355-4358 (1987)), and “evolutionary linkage” (See Holm, supra (1999), and Brenner, supra (1997)).

[0314] In certain embodiments, variants of antibodies include glycosylation variants wherein the number and/or type of glycosylation site has been altered compared to the amino acid sequences of a parent polypeptide. In certain embodiments, variants comprise a greater or a lesser number of N-linked glycosylation sites than the native protein. An N-linked glycosylation site is characterized by the sequence: Asn-X-Ser or Asn-X-Thr, wherein the amino acid residue designated as X can be any amino acid residue except proline. The substitution of amino acid residues to create this sequence provides a potential new site for the addition of an N-linked carbohydrate chain. Alternatively, substitutions which eliminate this sequence will remove an existing N-linked carbohydrate chain. Also provided is a rearrangement of N-linked carbohydrate chains wherein one or more N-linked glycosylation sites (typically those that are naturally occurring) are eliminated and one or more new N-linked sites are created. Additional preferred antibody variants include cysteine variants wherein one or more cysteine residues are deleted from or substituted for another amino acid (e.g., serine) as compared to the parent amino acid sequence. Cysteine variants can be useful when antibodies must be refolded into a biologically active conformation such as after the isolation of insoluble inclusion bodies. Cysteine variants generally have fewer cysteine residues than the native protein, and typically have an even number to minimize interactions resulting from unpaired cysteines.

[0315] According to certain embodiments, preferred amino acid substitutions are those which: (1) reduce susceptibility to proteolysis, (2) reduce susceptibility to oxidation, (3) alter binding affinity for forming protein complexes, (4) alter binding affinities, and/or (4) confer or modify other physiochemical or functional properties on such polypeptides. According to certain embodiments, single or multiple amino acid substitutions (in certain embodiments, conservative amino acid substitutions) may be made in the naturally-occurring sequence (in certain embodiments, in the portion of the polypeptide outside the domain(s) forming intermolecular contacts). In certain embodiments, a conservative amino acid substitution typically may not substantially change the structural characteristics of the parent sequence (e.g., a replacement amino acid should not tend to break a helix that occurs in the parent sequence, or disrupt other types of secondary structure that characterizes the parent sequence). Examples of art-recognized polypeptide secondary and tertiary structures are described in Proteins, Structures and Molecular Principles (Creighton, Ed., W. H. Freeman and Company, New York (1984)); Introduction to Protein Structure (C. Branden and J. Tooze, eds., Garland Publishing, New York, N.Y. (1991)); and Thornton et al. Nature 354:105 (1991), which are each incorporated herein by reference.

[0316] In certain embodiments, ABPs of the invention may be chemically bonded with polymers, lipids, or other moieties.

[0317] The binding agents may comprise at least one of the CDRs described herein incorporated into a biocompatible framework structure. In one example, the biocompatible framework structure comprises a polypeptide or portion thereof that is sufficient to form a conformationally stable structural support, or framework, or scaffold, which is able to display one or more sequences of amino acids that bind to an antigen (e.g., CDRs, a variable region, etc.) in a localized surface region. Such structures can be a naturally occurring polypeptide or polypeptide “fold” (a structural motif), or can have one or more modifications, such as additions, deletions or substitutions of amino acids, relative to a naturally occurring polypeptide or fold. These scaffolds can be derived from a polypeptide of any species (or of more than one species), such as a human, other mammal, other vertebrate, invertebrate, plant, bacteria or virus.

[0318] Typically, the biocompatible framework structures are based on protein scaffolds or skeletons other than immunoglobulin domains. For example, those based on fibronectin, ankyrin, lipocalin, neocarzinostain, cytochrome b, CP1 zinc finger, PST1, coiled coil, LACI-D1, Z domain and tendamistat domains may be used (See e.g., Nygren and Uhlen, 1997, Curr. Opin. in Struct. Biol., 7, 463-469).

[0319] It will be appreciated that the ABPs of the invention include the humanized antibodies described herein. Humanized antibodies such as those described herein can be produced using techniques known to those skilled in the art (Zhang, W., et al., Molecular Immunology. 42(12):1445-1451, 2005; Hwang W. et al., Methods. 36(1):35-42, 2005; Dall'Acqua W F, et al., Methods 36(1):43-60, 2005; and Clark, M., Immunology Today. 21(8):397-402, 2000).

[0320] Where an antibody comprises one or more of CDR3-H, and/or CDR3-L as described in Table 5, it may be obtained by expression from a host cell containing DNA coding for these sequences. A DNA coding for each CDR sequence may be determined on the basis of the amino acid sequence of the CDR and synthesized together with any desired antibody variable region framework and constant region DNA sequences using oligonucleotide synthesis techniques, site-directed mutagenesis and polymerase chain reaction (PCR) techniques as appropriate. DNA coding for variable region frameworks and constant regions is widely available to those skilled in the art from genetic sequences databases such as GenBank®.

[0321] Once synthesized, the DNA encoding an antibody of the invention or fragment thereof may be propagated and expressed according to any of a variety of well-known procedures for nucleic acid excision, ligation, transformation, and transfection using any number of known expression vectors. Thus, in certain embodiments expression of an antibody fragment may be preferred in a prokaryotic host, such as Escherichia coli (see, e.g., Pluckthun et al., 1989 Methods Enzymol. 178:497-515). In certain other embodiments, expression of the antibody or a fragment thereof may be preferred in a eukaryotic host cell, including yeast (e.g., Saccharomyces cerevisiae, Schizosaccharomyces pombe, and Pichia pastoris), animal cells (including mammalian cells) or plant cells. Examples of suitable animal cells include, but are not limited to, myeloma (such as a mouse NSO line), COS, CHO, or hybridoma cells. Examples of plant cells include tobacco, corn, soybean, and rice cells.

[0322] Replicable expression vectors containing DNA encoding an antibody variable and/or constant region may be prepared and used to transform an appropriate cell line, for example, a non-producing myeloma cell line, such as a mouse NSO line or a bacteria, such as E. coli, in which production of the antibody will occur. In order to obtain efficient transcription and translation, the DNA sequence in each vector should include appropriate regulatory sequences, particularly a promoter and leader sequence operatively linked to the variable domain sequence. Particular methods for producing antibodies in this way are generally well-known and routinely used. For example, basic molecular biology procedures are described by Maniatis et al. (Molecular Cloning, A Laboratory Manual, 2nd ed., Cold Spring Harbor Laboratory, New York, 1989; see also Maniatis et al, 3rd ed., Cold Spring Harbor Laboratory, New York, (2001)). DNA sequencing can be performed as described in Sanger et al. (PNAS 74:5463, (1977)) and the Amersham International plc sequencing handbook, and site directed mutagenesis can be carried out according to methods known in the art (Kramer et al., Nucleic Acids Res. 12:9441, (1984); Kunkel Proc. Natl. Acad. Sci. USA 82:488-92 (1985); Kunkel et al., Methods in Enzymol. 154:367-82 (1987); the Anglian Biotechnology Ltd. handbook). Additionally, numerous publications describe techniques suitable for the preparation of antibodies by manipulation of DNA, creation of expression vectors, and transformation and culture of appropriate cells (Mountain A and Adair, J R in Biotechnology and Genetic Engineering Reviews (ed. Tombs, M P, 10, Chapter 1, 1992, Intercept, Andover, UK); “Current Protocols in Molecular Biology”, 1999, F. M. Ausubel (ed.), Wiley Interscience, New York).

[0323] Where it is desired to improve the affinity of ABPs according to the invention containing one or more of the above-mentioned CDRs can be obtained by a number of affinity maturation protocols including maintaining the CDRs (Yang et al., J. Mol. Biol., 254, 392-403, 1995), chain shuffling (Marks et al., Bio/Technology, 10, 779-783, 1992), use of mutation strains of E. coli. (Low et al., J. Mol. Biol., 250, 350-368, 1996), DNA shuffling (Patten et al., Curr. Opin. Biotechnol., 8, 724-733, 1997), phage display (Thompson et al., J. Mol. Biol., 256, 7-88, 1996) and sexual PCR (Crameri, et al., Nature, 391, 288-291, 1998). All of these methods of affinity maturation are discussed by Vaughan et al. (Nature Biotech., 16, 535-539, 1998).

[0324] It will be understood by one skilled in the art that some proteins, such as antibodies, may undergo a variety of posttranslational modifications. The type and extent of these modifications often depends on the host cell line used to express the protein as well as the culture conditions. Such modifications may include variations in glycosylation, methionine oxidation, diketopiperizine formation, aspartate isomerization and asparagine deamidation. A frequent modification is the loss of a carboxy-terminal basic residue (such as lysine or arginine) due to the action of carboxypeptidases (as described in Harris, R. J. Journal of Chromatography 705:129-134, 1995).

[0325] Pharmaceutical Compositions

[0326] Pharmaceutical compositions containing one or more of the RPPs of the present disclosure are also provided. Such compositions comprise a therapeutically or prophylactically effective amount of the polypeptide or protein in a mixture with pharmaceutically acceptable materials.

[0327] In some embodiments, the pharmaceutical composition comprises an RPP produced using sequences derived from immune cells of a donor expoosued to one or more SARS-CoV-2 antigens. In some embodiments, the pharmaceutical composition comprises RPPs produced using sequences derived from immune cells of multiple donors expoosued to one or more SARS-CoV-2 antigens. The donors can be a human, non-human animal (mouse, humanized mouse, rat, humanized rat, horse, or cow) or both.

[0328] In some embodiments, the pharmaceutical composition comprises a first RPP comprising a first ABPs, wherein each of the first ABPs specifically binds to a first antigen, and a second RPP comprising a second ABPs, wherein each of the second ABPs specifically binds to a second antigen. In some embodiments, the first antigen is SARS-CoV-2 receptor binding domain (RBD) and the second antigen is SARS-CoV-2 spike S1. In some embodiments, the first antigen is SARS-CoV-2 receptor binding domain (RBD) or SARS-CoV-2 spike S1, and the second antigen is a different antigen of SARS-CoV-2.

[0329] In some embodiments, the pharmaceutical composition comprises about 10, 100, 500, 1,000, 5,000, 10,000, 50,000 or more than 100,000 distinct ABPs, each having a unique sequence. In some embodiments, the pharmaceutical composition comprises at least 10, 100, 500, 1,000, 5,000, 10,000, 20,000, 30,000, 40,000, 50,000 or more than 100,000 distinct ABPs, each having a unique sequence.

[0330] The pharmaceutical composition may contain formulation materials for modifying, maintaining or preserving, for example, the pH, osmolarity, viscosity, clarity, color, isotonicity, odor, sterility, stability, rate of dissolution or release, adsorption or penetration of the composition.

[0331] Suitable formulation materials include, but are not limited to, amino acids (such as glycine, glutamine, asparagine, arginine or lysine); antimicrobials; antioxidants (such as ascorbic acid, sodium sulfite or sodium hydrogen-sulfite); buffers (such as borate, bicarbonate, Tris-HCl, citrates, phosphates, other organic acids); bulking agents (such as mannitol or glycine), chelating agents (such as ethylenediamine tetraacetic acid (EDTA)); complexing agents (such as caffeine, polyvinylpyrrolidone, beta-cyclodextrin or hydroxypropyl-beta-cyclodextrin); fillers; monosaccharides; disaccharides and other carbohydrates (such as glucose, mannose, or dextrins); proteins (such as serum albumin, gelatin or immunoglobulins); coloring; flavoring and diluting agents; emulsifying agents; hydrophilic polymers (such as polyvinylpyrrolidone); low molecular weight polypeptides; salt-forming counterions (such as sodium); preservatives (such as benzalkonium chloride, benzoic acid, salicylic acid, thimerosal, phenethyl alcohol, methylparaben, propylparaben, chlorhexidine, sorbic acid or hydrogen peroxide); solvents (such as glycerin, propylene glycol or polyethylene glycol); sugar alcohols (such as mannitol or sorbitol); suspending agents; surfactants or wetting agents (such as pluronics, PEG, sorbitan esters, polysorbates such as polysorbate 20, polysorbate 80, triton, tromethamine, lecithin, cholesterol, tyloxapal); stability enhancing agents (sucrose or sorbitol); tonicity enhancing agents (such as alkali metal halides (preferably sodium or potassium chloride, mannitol sorbitol); delivery vehicles; diluents; excipients and/or pharmaceutical adjuvants. Neutral buffered saline or saline mixed with conspecific serum albumin are examples of appropriate diluents. In accordance with appropriate industry standards, preservatives such as benzyl alcohol may also be added. The composition may be formulated as a lyophilizate using appropriate excipient solutions (e.g., sucrose) as diluents. Suitable components are nontoxic to recipients at the dosages and concentrations employed. Further examples of components that may be employed in pharmaceutical formulations are presented in Remington's Pharmaceutical Sciences, 16^{th} Ed. (1980) and 20^{th} Ed. (2000), Mack Publishing Company, Easton, Pa.

[0332] Optionally, the composition additionally comprises one or more physiologically active agents, for example, an anti-viral agent, plasma IVIg, etc. In various embodiments, the composition comprises one, two, three, four, five, or six physiologically active agents in addition to an RPP.

[0333] In another embodiment of the invention, the compositions disclosed herein may be formulated in a neutral or salt form. Illustrative pharmaceutically-acceptable salts include the acid addition salts (formed with the free amino groups of the protein) and which are formed with inorganic acids such as, for example, hydrochloric or phosphoric acids, or such organic acids as acetic, oxalic, tartaric, mandelic, and the like. Salts formed with the free carboxyl groups can also be derived from inorganic bases such as, for example, sodium, potassium, ammonium, calcium, or ferric hydroxides, and such organic bases as isopropylamine, trimethylamine, histidine, procaine and the like. Upon formulation, solutions will be administered in a manner compatible with the dosage formulation and in such amount as is therapeutically effective.

[0334] The carriers can further comprise any and all solvents, dispersion media, vehicles, coatings, diluents, antibacterial and antifungal agents, isotonic and absorption delaying agents, buffers, carrier solutions, suspensions, colloids, and the like. The use of such media and agents for pharmaceutical active substances is well known in the art. Except insofar as any conventional media or agent is incompatible with the active ingredient, its use in the therapeutic compositions is contemplated. Supplementary active ingredients can also be incorporated into the compositions. The phrase “pharmaceutically-acceptable” refers to molecular entities and compositions that do not produce an allergic or similar untoward reaction when administered to a human.

[0335] The optimal pharmaceutical composition will be determined by one skilled in the art depending upon, for example, the intended route of administration, delivery format, and desired dosage. See for example, Remington's Pharmaceutical Sciences, supra. Such compositions may influence the physical state, stability, rate of in vivo release, and rate of in vivo clearance of the polypeptide. For example, suitable compositions may be water for injection, physiological saline solution for parenteral administration.

### Content of Pharmaceutically Active Ingredient

[0336] In typical embodiments, the active ingredient (i.e., the proteins and polypeptides of the present invention) is present in the pharmaceutical composition at a concentration of at least 0.01 mg/ml, at least 0.1 mg/ml, at least 0.5 mg/ml, or at least lmg/ml. In certain embodiments, the active ingredient is present in the pharmaceutical composition at a concentration of at least 1 mg/ml, 2 mg/ml, 3 mg/ml, 4 mg/ml, 5 mg/ml, 10 mg/ml, 15 mg/ml, 20 mg/ml, or 25 mg/ml. In certain embodiments, the active ingredient is present in the pharmaceutical composition at a concentration of at least 30 mg/ml, 35 mg/ml, 40 mg/ml, 45 mg/ml or 50 mg/ml. In certain embodiments, the active ingredient is present in the pharmaceutical composition at a concentration of at least 100 mg/ml, 250 mg/ml, 500 mg/ml, 750 mg/ml, 1 g/ml, 5 g/ml, 10 g/ml, or 50 g/ml.

### Formulation Generally

[0337] The pharmaceutical composition can be in any form appropriate for human or veterinary medicine, including a liquid, an oil, an emulsion, a gel, a colloid, an aerosol or a solid.

[0338] The pharmaceutical composition can be formulated for administration by any route of administration appropriate for human or veterinary medicine, including enteral and parenteral routes of administration.

[0339] In some embodiments, the pharmaceutical composition is formulated for intravenous, intraperitoneal, intramuscular, or subcutaneous administration. In some embodiments, the pharmaceutical composition is formulated for intravenous injection or intravenous infusion.

[0340] In some embodiments, the pharmaceutical composition is formulated for intrathecal or intracerebroventricular administration.

[0341] In some embodiments, the pharmaceutical composition is formulated for topical administration.

### Pharmacological Compositions Adapted for Injection

[0342] For intravenous, cutaneous or subcutaneous injection, or injection at the site of affliction, the active ingredient will be in the form of a parenterally acceptable aqueous solution which is pyrogen-free and has suitable pH, isotonicity and stability. Those of relevant skill in the art are well able to prepare suitable solutions using, for example, isotonic vehicles such as Sodium Chloride Injection, Ringer's Injection, Lactated Ringer's Injection. Preservatives, stabilisers, buffers, antioxidants and/or other additives can be included, as required.

[0343] In various embodiments, the unit dosage form is a vial, ampule, bottle, or pre-filled syringe. In some embodiments, the unit dosage form contains 0.01 mg, 0.1 mg, 0.5 mg, 1 mg, 2.5 mg, 5 mg, 10 mg, 12.5 mg, 25 mg, 50 mg, 75 mg, or 100 mg of the pharmaceutical composition. In some embodiments, the unit dosage form contains 125 mg, 150 mg, 175 mg, or 200 mg of the pharmaceutical composition. In some embodiments, the unit dosage form contains at least 250 mg, 1 g, 10 g, 20 g, 30 g, 40 g, 50 g, 60 g, 70 g, 80 g, 90 g, or 100 g of the pharmaceutical composition. In some embodiments, the unit dosage form contains about 250 mg, 1 g, 10 g, 20 g, 30 g, 40 g, 50 g, 60 g, 70 g, 80 g, 90 g, or 100 g of the pharmaceutical composition.

[0344] In typical embodiments, the pharmaceutical composition in the unit dosage form is in liquid form. In various embodiments, the unit dosage form contains between 0.1 mL and 50 ml of the pharmaceutical composition. In some embodiments, the unit dosage form contains 1 ml, 2.5 ml, 5 ml, 7.5 ml, 10 ml, 25 ml, or 50 ml of pharmaceutical composition.

[0345] In particular embodiments, the unit dosage form is a vial containing 1 ml of the pharmaceutical composition containing an active ingredient (e.g., RPP) at a concentration of 0.01 mg/ml, 0.1 mg/ml, 0.5 mg/ml, or lmg/ml. In particular embodiments, the unit dosage form is a vial containing 1 ml of the pharmaceutical composition containing an active ingredient (e.g., RPP) at a concentration of 0.01 mg/ml, 0.1 mg/ml, 0.5 mg/ml, lmg/ml, 2 mg/ml, 3 mg/ml, 4 mg/ml, 5 mg/ml, 10 mg/ml, 15 mg/ml, 20 mg/ml, 25 mg/ml, 30 mg/ml, 35 mg/ml, 40 mg/ml, 45 mg/ml or 50 mg/ml, 100 mg/ml, 250 mg/ml, 500 mg/ml, 750 mg/ml, 1 g/ml, 5 g/ml, 10 g/ml, or 50 g/ml. In some embodiments, the unit dosage form is a vial containing 2 ml of the pharmaceutical composition containing an active ingredient at a concentration of 0.01 mg/ml, 0.1 mg/ml, 0.5 mg/ml, lmg/ml, 2 mg/ml, 3 mg/ml, 4 mg/ml, 5 mg/ml, 10 mg/ml, 15 mg/ml, 20 mg/ml, 25 mg/ml, 30 mg/ml, 35 mg/ml, 40 mg/ml, 45 mg/ml or 50 mg/ml, 100 mg/ml, 250 mg/ml, 500 mg/ml, 750 mg/ml, 1 g/ml, 5 g/ml, 10 g/ml, or 50 g/ml.

[0346] In some embodiments, the pharmaceutical composition is formulated for injection of an active ingredient at a single dose or multiple doses of between 0.010 and 5 g/kg body weight. In some embodiments, the pharmaceutical composition is formulated for injection of an active ingredient at a single dose of 0.010 g/kg body weight. In some embodiments, the pharmaceutical composition is formulated for injection at a single dose of 0.01, 0.05, 0.15, 0.20, 0.25, 0.30, 0.35, 0.40, 0.45, 0.50, 0.55, 0.60, 0.65, 0.70, 0.75, 0.80, 0.85, 0.90, 0.95, or 0.1 g/kg body weight.

[0347] In some embodiments, the unit dose contains at least 0.1 g, 0.5 g, 1 g, 1.5 g, 2 g, 2.5 g, 3 g, 3.5 g, 4 g, 5 g, 10 g, 20 g, 30 g, 40 g, or 50 g of the active ingredient (e.g., RPP). In some embodiments, the unit dose contains about 0.1 g, 0.5 g, 1 g, 1.5 g, 2 g, 2.5 g, 3 g, 3.5 g, 4 g, 5 g, 10 g, 20 g, 30 g, 40 g, or 50 g of the active ingredient (e.g., RPP).

[0348] The amount of active ingredient which can be combined with a carrier material to produce a single dosage form will generally be that amount of the compound which produces a therapeutic effect.

[0349] The pharmaceutical compositions may conveniently be presented in unit dosage form.

[0350] The unit dosage form will typically be adapted to one or more specific routes of administration of the pharmaceutical composition.

[0351] In some embodiments, the pharmaceutical composition in the unit dosage form is in solid form, such as a lyophilate, suitable for solubilization.

[0352] In some embodiments, the unit dosage form is suitable for subcutaneous, intradermal, or intramuscular administration include preloaded syringes, auto-injectors, and autoinject pens, each containing a predetermined amount of the pharmaceutical composition described hereinabove.

[0353] In various embodiments, the unit dosage form is a preloaded syringe, comprising a syringe and a predetermined amount of the pharmaceutical composition. In certain preloaded syringe embodiments, the syringe is adapted for subcutaneous administration. In certain embodiments, the syringe is suitable for self-administration. In particular embodiments, the preloaded syringe is a single use syringe.

[0354] In certain embodiments, the unit dosage form is an autoinject pen. The autoinject pen comprises an autoinject pen containing a pharmaceutical composition as described herein. In some embodiments, the autoinject pen delivers a predetermined volume of pharmaceutical composition. In other embodiments, the autoinject pen is configured to deliver a volume of pharmaceutical composition set by the user.

7.1.1. Mixtures of Plasma IVIg with Recombinant Hyperimmunes

[0355] In some embodiments, a recombinant hyperimmune is spiked into conventional plasma IVIg to increase the anti-pathogen titer of IVIg. In some embodiments, several anti-pathogen recombinant hyperimmunes are spiked into conventional plasma IVIg. Any number of spike-ins can be mixed with plasma IVIg to generate increased titers against any number of pathogens.

[0356] In some embodiments, the spike-in recombinant hyperimmunes are mixed with plasma IVIg by the pharmacist. In some embodiments, the spike-in recombinant hyperimmunes are mixed with plasma IVIg by the manufacturer.

[0357] Methods of Treating a Disease Responsive to an RPP

[0358] In another aspect, methods are presented for treating a subject having a disease responsive to an RPP. The disease can be a viral infection, e.g., COVID-19. In some embodiments, the method comprises administering the pharmaceutical composition, the RPP disclosed herein to a patient infected with coronavirus or having a symptom of COVID-19.

[0359] In vivo and/or in vitro assays may optionally be employed to help identify optimal dosage ranges. The precise dose to be employed in the formulation will also depend on the route of administration, and the seriousness of the condition, and should be decided according to the judgment of the practitioner and each subject's circumstances. Effective doses may be extrapolated from dose-response curves derived from in vitro or animal model test systems.

[0360] The actual amount administered, and rate and time-course of administration, will depend on the nature and severity of protein aggregation disease being treated. Prescription of treatment, e.g. decisions on dosage etc., is within the responsibility of general practitioners and other medical doctors, and typically takes account of the disorder to be treated, the condition of the individual patient, the site of delivery, the method of administration and other factors known to practitioners. Examples of the techniques and protocols mentioned above can be found in Remington's Pharmaceutical Sciences, 16th edition, Osol, A. (ed), 1980.

[0361] In some embodiments, the pharmaceutical composition is administered by injection, infusion, or by topical application. In some embodiments, the pharmaceutical composition is administered by intravenous infusion.

[0362] In some embodiments, the pharmaceutical composition is administered at a dose of 0.01, 0.05, 0.15, 0.20, 0.25, 0.30, 0.35, 0.40, 0.45, 0.50, 0.55, 0.60, 0.65, 0.70, 0.75, 0.80, 0.85, 0.90, 0.95, or 0.1 g active ingredient (RPP) /kg body weight. In some embodiments, the pharmaceutical composition is administered at a dose of about 0.01, 0.05, 0.15, 0.20, 0.25, 0.30, 0.35, 0.40, 0.45, 0.50, 0.55, 0.60, 0.65, 0.70, 0.75, 0.80, 0.85, 0.90, 0.95, or 0.1 g active ingredient (RPP)/kg body weight. In some embodiments, the pharmaceutical composition is administered at a dose of more than 0.01, 0.05, 0.15, 0.20, 0.25, 0.30, 0.35, 0.40, 0.45, 0.50, 0.55, 0.60, 0.65, 0.70, 0.75, 0.80, 0.85, 0.90, 0.95, or 0.1 g active ingredient (RPP)/kg body weight.

[0363] In some embodiments, the pharmaceutical composition is administered once a day, 2-4 times a day, 2-4 times a week, once a week, or once every two weeks.

[0364] In some embodiments, the pharmaceutical composition is administered once, twice, three times, four times, five times, or more. In some embodiments, the pharmaceutical composition is administered once a day for one, two, three, four, five, or more days. In some embodiments, the pharmaceutical composition is administered until the desired outcome is observed.

[0365] In some embodiments, the pharmaceutical composition is administered with plasma IVIg.

### 8. EXAMPLES

[0366] Below are examples of specific embodiments for carrying out the present invention. The examples are offered for illustrative purposes only, and are not intended to limit the scope of the present invention in any way. Efforts have been made to ensure accuracy with respect to numbers used (e.g., amounts, temperatures, etc.), but some experimental error and deviation should, of course, be allowed for.

[0367] The practice of the present invention will employ, unless otherwise indicated, conventional methods of protein chemistry, biochemistry, recombinant DNA techniques and pharmacology, within the skill of the art. Such techniques are explained fully in the literature. See, e.g., T. E. Creighton, Proteins: Structures and Molecular Properties (W. H. Freeman and Company, 1993); A. L. Lehninger, Biochemistry (Worth Publishers, Inc., current addition); Sambrook, et al., Molecular Cloning: A Laboratory Manual (2nd Edition, 1989); Methods In Enzymology (S. Colowick and N. Kaplan eds., Academic Press, Inc.); Remington's Pharmaceutical Sciences, 18th Edition (Easton, Pa.: Mack Publishing Company, 1990); Carey and Sundberg Advanced Organic Chemistry 3^{rd} Ed. (Plenum Press) Vols A and B(1992).

### Example 1: Generation of rCIG Using Immunized Mice

[0368] Two RPPs targeting COVID-19 were produced, one selected for binding to the SARS-CoV-2 receptor binding domain (RBD) and the other for binding to the SARS-CoV-2 spike S1 protein, using Trianni immunized mice as the donors. The heavy and light chain CDR3 sequences are provided in Table 5 above.

[0369] First, transgenic mice carrying inserted human immunoglobulin genes were immunized with a protocol comprising adjuvant, RBD, and inactivated SARS-CoV-2 virus. Footpad injections were performed on two Trianni Mice twice weekly for four weeks. Before the final boosts, the serum titer of thymocyte antibodies was assessed by flow cytometry, using a dilution series of RBD and Spike S1 antigen. A strong serum response was observed in the animals, with one animal showing a slightly stronger response. Lymph nodes (popliteal, inguinal, axillary, and mesenteric) were surgically removed after sacrifice. Single cell suspensions for each animal were made by manual disruption followed by passage through a 70 μm filter. Next, the EasySep™ Mouse Pan-B Cell Isolation Kit (Stemcell Technologies) negative selection kit was used to isolate B cells from each sample. The lymph node B cell populations were quantified by counting on a C-Chip hemocytometer (Incyto) and assessed for viability using Trypan blue. The cells were then diluted to 5,000-6,000 cells/mL in phosphate-buffered saline (PBS) with 12% OptiPrep™ Density Gradient Medium (Sigma). This cell mixture was used for microfluidic encapsulation. Approximately one million B cells from each of the six animals were run through an emulsion droplet microfluidics platform.

[0370] A DNA library encoding scFv from RNA of single cells, with native heavy-light Ig pairing intact, was generated using the emulsion droplet microfluidics platform or vortex emulsions. The method for generating the DNA library comprises the steps of 1) poly(A)+mRNA capture, 2) multiplexed overlap extension reverse transcriptase polymerase chain reaction (OE-RT-PCR), and 3) nested PCR to remove artifacts and add adapters for deep sequencing or yeast display libraries. The scFv libraries are generated from approximately one million B cells from each animal that achieved a positive titer.

[0371] For poly(A)+mRNA capture, a custom designed co-flow emulsion droplet microfluidic chip fabricated from glass (Dolomite) was used. The microfluidic chip has two input channels for fluorocarbon oil (Dolomite), one input channel for the cell suspension mix described above, and one input channel for oligo-dT beads (NEB) at 1.25 mg/ml in cell lysis buffer (20 mM Tris pH 7.5, 0.5 M NaCl, 1 mM ethylenediaminetetraacetic acid (EDTA), 0.5% Tween-20, and 20 mM dithiothreitol). The input channels are etched to 50 μm by 150 μm for most of the chip's length, narrow to 55 μm at the droplet junction, and were coated with hydrophobic Pico-Glide (Dolomite). Three Mitos P-Pump pressure pumps (Dolomite) were used to pump the liquids through the chip. Droplet size depends on pressure, but typically droplets of ˜45 μm diameter were optimally stable. Emulsions were collected into chilled 2 ml microcentrifuge tubes and incubated at 40° C. for 15 minutes for mRNA capture. The beads were extracted from the droplets using Pico-Break (Dolomite). In some embodiments, similar single cell partitioning emulsions are made using a vortex.

[0372] For multiplex OE-RT-PCR, glass Telos droplet emulsion microfluidic chips were used (Dolomite). mRNA-bound beads were re-suspended into OE-RT-PCR mix and injected into the microfluidic chips with a mineral oil-based surfactant mix (available commercially from GigaGen) at pressures that generate 27 μm droplets. The OE-RT-PCR mix contains 2× one-step RT-PCR buffer, 2.0 mM MgSO₄, SuperScript III reverse transcriptase, and Platinum Taq (Thermo Fisher Scientific), plus a mixture of primers directed against the IgK C region, the IgG C region, and all V regions. The overlap region is a DNA sequence that encodes a Gly-Ser rich scFv linker sequence. The DNA fragments were recovered from the droplets using a droplet breaking solution (available commercially from GigaGen) and then purified using QlAquick PCR Purification Kit (Qiagen). In some embodiments, similar OE-RT-PCR emulsions were made using a vortex.

[0373] For nested PCR, the purified OE-RT-PCR product was first run on a 1.7% agarose gel for 80 minutes at 150 V. A band at 1200-1500 base pair (bp) corresponding to the linked product was excised and purified using NucleoSpin Gel and PCR Clean-up Kit (Macherey Nagel). PCR was then performed to add adapters for Illumina sequencing or yeast display; for sequencing, a randomer of seven nucleotides is added to increase base calling accuracy in subsequent next generation sequencing steps. Nested PCR was performed with 2× NEBNext High-Fidelity amplification mix (NEB) with either Illumina adapter containing primers or primers for cloning into the yeast expression vector. The nested PCR product was run on a 1.2% agarose gel for 50 minutes at 150V. A band at 800-1100 bp was excised and purified using NucleoSpin Gel and PCR Clean-up Kit (Macherey Nagel).

[0374] The OE-RT-PCR products were used as template in a nested PCR to add adapters for yeast surface display. S. cerevisiae cells (ATCC) were electroporated (Bio-Rad Gene Pulser II; 0.54 kV, 25 uF, infinite resistance) with the PCR product combined with a linearized vector for in vivo homologous recombination and inducible expression of scFv protein. Transformed yeast were expanded, induced with galactose, and approximately 2×10⁶ induced yeast cells were stained with anti-c-Myc (Thermo Fisher Scientific) followed by a FITC-conjugated secondary antibody (Thermo Fisher Scientific), and biotinylated SARS CoV-2 RBD or Spike (1200 nM final concentration) followed by APC-streptavidin (Thermo Fisher Scientific); an scFv library specific for an unrelated target was used as a negative control. Yeast cells were then sorted (BD Influx) and 20-30×10³ double-positive cells (FITC/APC+) were recovered. For further specificity, a second round of sorting using the same antigen was performed and 50×10³ double-positive yeast was recovered.

[0375] The flow-sorted scFv were then subjected to sequencing (Illumina). Sequences identified using yeast scFv sorting with SARS-CoV-2 RBD are listed as Sequences 5083 through 6630, and sequences identified using yeast scFv sorting with SARS-CoV-2 Spike S1 are listed as Sequences 6631 through 8390. In some embodiments, sequences comprising Sequences 5083 through 8390 are used to generate an RPPs with binding and neutralization activity against SARS-CoV-2.

[0376] In certain embodiments, rCIG is an RPP comprising antibodies derived from one, two, four, eight, twelve, 50, or 100 mice. In certain embodiments, rCIG is an RPP comprising, 10, 100, 1,000, 10,000, 100,000, or more than 100,000 distinct antibody sequences. In certain embodiments, rCIG is an RPP comprising antibodies at various molar ratios, or antibodies comprising substantially similar molar ratios. In certain embodiments, these RPPs comprise therapeutics for COVID-19. In other embodiments, any single antibody from the RPP is used as a therapeutic for COVID-19. In certain embodiments, any single antibody or RPP is used as a therapeutic for any kind of coronavirus infection in human patients.

### Example 2: Generation of RPP with Activity Against SARS CoV-2 from Convalescent COVID-19 Human Donors

[0377] Overview

[0378] Multiple rCIG (recombinant anti-coronavirus 19 hyperimmune gammaglobulin), i.e., RPP antibody pools with activity against COVID-19 antigens, were generated using B cells from convalescent COVID-19 donors. The sequence identifiers of the heavy and light chain CDR3 sequences are provided in Table 5, above, corresponding the sequences found in the sequence listing.

[0379] The rCIG drug is a fully recombinant IgG1/IgK polyclonal antibody preparation, comprising >1,000 unique antibody sequences at various ratios. The antibody sequences were derived from COVID-19 convalescent human donor peripheral blood mononuclear cells (PBMCs).

[0380] First, COVID-19 patients underwent IRB-approved consent at clinical sites, and approximately 50 mL of blood from each donor was obtained. Each sample was assessed for residual SARS CoV-2 using CDC qPCR assays. Additionally, each serum sample was tested for seroconversion using anti-SARS CoV-2 ELISA. The 16 high-titer convalescent COVID-19 donors were selected and custom microfluidics was used to capture natively paired antibody sequences from millions of donor B cells. The captured, natively paired, nucleic acid sequences were then expressed as yeast scFv libraries, and subjected to flow cytometry to enrich for binders against SARS CoV-2 RBD. Antibody nucleic acid sequences were purified from the sorted yeast clones and then engineered into full-length IgG1 antibody expression constructs, still retaining native pairing between heavy and light chain Ig.

[0381] The flow-sorted scFv were subjected to sequencing (Illumina). Sequences identified using yeast scFv sorting with SARS-CoV-2 RBD are listed as Sequences 1 through 4760, and sequences identified using yeast scFv sorting with SARS-CoV-2 Spike Slare listed as Sequences 4761 through 5082. In some embodiments, sequences comprising Sequences 1 through 5082 are used to generate an RPPs with binding and neutralization activity against SARS-CoV-2. In some embodiments, single antibodies comprising Sequences 1 through 5082 are used as a therapeutic for COVID-19, or any coronavirus infection in patients.

[0382] To convert the scFv libraries into full-length CHO expression libraries (RPPs), nested outer PCR primers were used to add adapters with overhangs for Gibson assembly to the 5′ and 3′ ends of the scFv library. Then NEBuilder HiFi DNA Assembly Master Mix (NEB, Ipswich, Mass., USA) was used to insert the scFv library into a vector containing a single promoter, a secretory leader sequence for light chain Ig and the remainder of the IgG1 constant region, creating a cloned scFv library. This intermediate library was transformed into E. coli, spread onto LB-ampicillin plates, 0.5-1 million colonies were scraped and pooled for a plasmid purification using ZymoPURE II Plasmid Maxiprep Kits (Zymo Research, Irvine, Calif., USA). To create the full-length antibody library, a second Gibson assembly was performed by linearizing the product of GA1 with BamHI-HF (NEB, Ipswich, Mass., USA) and using it as a vector to insert a synthetic amplicon containing a portion of the light chain Ig constant region, a poly(A) signal for light chain Ig, a promoter for the IgG gene and a secretory leader sequence for the IgG gene. The full-length library was then transformed into E. coli and spread on LB-ampicillin plates Over 0.5 million colonies are scraped and plasmid is purified with a ZymoPURE II Plasmid Maxiprep Kits (Zymo Research) to make the full-length recombinant hyperimmune maxiprep library for transfection.

[0383] The adherent Flp-In™-CHO cell line was adapted with a genomically integrated FRT site (Thermo Fisher Scientific, Waltham, Mass., USA) to suspension culture. For all steps in the adaptation process, “Ham's F-12” refers to Ham's F-12 (with L-glutamine, Thermo Fisher Scientific, Waltham, Mass., USA) plus 10% FBS (Thermo Fisher Scientific, Waltham, Mass., USA) and “BalanCD” refers to BalanCD CHO Growth A (Irvine Scientific) with 4 mM Glutamax (Thermo Fisher Scientific, Waltham, Mass., USA). To adapt this cell line to suspension, the cells were first passaged into a mixture of 50% Ham's F-12 plus 50% BalanCD in T-flasks. Cells were next passaged into 25% Ham's F-12 plus 75% BalanCD and switched to shaking Erlenmeyer flasks. Cells were then passaged into 10% Ham's F-12, 90% BalanCD+0.2% anti-clumping agent (Irvine Scientific, Santa Ana, Calif., USA) and banked for future use.

[0384] 100 million of the adapted Flp-In CHO cells were transfected per recombinant hyperimmune library using an Amaxa Nucleofector 4D (SG buffer, pulse DU133; Lonza, Basel, Switzerland). These cells were plated into shaking Erlenmeyer flasks and recovered in an incubator at 37° C. and 125 rpm for 48 hours. After 48 hours, the cells were counted to determine viability, cells were seeded at 1 million cells/mL, and selection was started using 600 μg/mL Hygromycin-B (Gemini Bio, West Sacramento, Calif., USA) in fresh media. Cells were counted and media was changed every 2-3 days during the 7-day selection. The libraries were kept on 600 μg/mL Hygromycin-B (Gemini Bio, West Sacramento, Calif., USA) during expansion until viability exceeded 95%. When cells were >95% viable and doubling every 24 hours, the cell line was banked for liquid nitrogen storage.

[0385] CHO cells stably expressing antibody libraries were grown in media consisting of 90% BalanCD CHO Growth A Medium (Irvine Scientific, Santa Ana, Calif.), 9% Ham's F-12 (Thermo Fisher Scientific, Waltham, Mass., USA), 1% FBS (ThermoFisher Scientific), 4 mM Glutamax (Thermo Fisher Scientific, Waltham, Mass., USA), 0.2% anti-clumping agent (Irvine Scientific, Santa Ana, Calif., USA). For small-scale production, cells were seeded at 1×10⁶ cells/mL into 50 mL media in a 250 mL Erlenmeyer flask and grown at 37° C., 5% CO₂, 125 rpm. Cells were continually grown under these conditions and supplemented with 7.5 mL CHO Feed 1 (Irvine Scientific, Santa Ana, Calif., USA) on days 2, 4 and 7 of the production run. Supernatant was harvested on Day 8 by centrifugation followed by filtration through a 0.22 μm 250 mL filter bottle (EMD Millipore, Burlington, Mass., USA) with 1 μm pre-filter (EMD Millipore, Burlington, Mass., USA). Harvested cell culture fluid (HCCF) was stored at 4° C. until Protein A purification. For large-scale production of the plasma cell recombinant hyperimmune, cells were grown in the same media but with some modifications to the production conditions. A seed train was used to scale the cultures from 2×10⁷ cells to 1.2×10¹⁰ cells at 37° C. Cells were then seeded at 1×10⁶ cells/mL in 2 L in a 5 L flask (in triplicate; Day 0). On Day 2 the temperature was shifted from 37° C. to 33° C. Each flask was fed with 300 mL CHO Feed 1 (Irvine Scientific, Santa Ana, Calif., USA) on days 2, 4, 6, 8, 10, and 13 of the culture. Supernatant was harvested on Day 14.

[0386] After harvest, HCCF was purified with Mab Select SuRe Protein A resin (GE Life Sciences, Marlborough, Mass., USA) using the following buffers: Equilibration, Chase, Wash 2 (25 mM Tris, 150 mM NaCl, pH 7.4), Wash 1 (25 mM Tris, 1 M NaCl, pH 7.4), Elution (20 mM citric acid, pH 3.0), Neutralization (100 mM Tris, pH 8.0 for small scale, 1 M Tris, pH 9.0 for large scale). The column was sanitized before and after use with 0.1 N NaOH. For the large-scale production of the plasma cell recombinant hyperimmune, an additional Wash 3 consisting of 0.5 M arginine, pH 7.4 was used, followed by an additional wash with Wash 2 before elution. The order of purification steps was: Equilibration, Load, Chase, Wash 1, Wash 2, (large scale: Wash 3, Wash 2), Elution, Neutralization (added manually into tubes used for collection of eluate fractions). The recombinant hyperimmunes (RPPs) were concentrated using Vivaspin 20, 30 kDa molecular weight cut off spin concentrators (Sartorius, Gottingen, Germany) and formulated in PBS (small-scale productions) or 0.2 M glycine, pH 4.5 (large scale production), followed by 0.22 μm filtration.

[0387] This processed resulted in integration of a single heavy-light chain-paired transgene into the genomic FRT site of individual CHO cells, creating cell pools, or “research cell banks” (RCBs). In certain embodiments, these RCBs are combined to create a CHO polyclonal master cell bank (MCB).

[0388] In certain embodiments, rCIG is an RPP comprising antibodies derived from one, two, four, eight, twelve, 50, or 100 human donors. In certain embodiments, rCIG is an RPP comprising, 10, 100, 1,000, 10,000, 100,000, or more than 100,000 distinct antibody sequences. In certain embodiments, rCIG is an RPP comprising antibodies at various molar ratios, or antibodies comprising substantially similar molar ratios. In certain embodiments, these RPPs comprise therapeutics for COVID-19. In other embodiments, any single antibody from the RPP is used as a therapeutic for COVID-19. In certain embodiments, any single antibody or RPP is used as a therapeutic for any kind of coronavirus infection in human patients.

[0389] Upstream GMP manufacturing is carried out using this MCB and standard GMP protocols in single-use fed-batch bioreactors. The rCIG protein is purified with Protein A resin and standard downstream recombinant antibody processing steps, including anion and cation exchange, viral inactivation and filtration, and diafiltration/ultrafiltration (DF/UF). Viral clearance studies and full MCB characterization are performed. A plasma-derived IVIG is used as a reference control for protein quality assessment. Plasma-derived IVIG is the best available reference control, since it comprises a diverse set of antibodies, like rCIG, and serves as a baseline for an immunoglobulin that is not highly reactive against SARS CoV-2. Lot release assays include a battery of assays typically used to assess purity, such as SEC HPLC, CE-SDS, host cell protein, and potency, such as anti-SARS CoV-2 ELISA. Anti-SARS CoV-2 ELISA, SEC HPLC, and CD-SDS is used to infer identity.

[0390] Quantitative PCR (qPCR) is used to confirm the absence of SARS CoV-2 RNA present in donor PBMCs.

[0391] Host Cell Line Development

[0392] A large-scale screen was performed to identify a parental host cell clone for targeted integration of rCIG expression construct libraries.

[0393] First, a landing pad construct (PMD-4681) was designed and synthesized. PMD-4681 was based on pFRT-lacZeo (ThermoFisher), with some modifications (FIG. 1). In place of the LacZ expression construct a cassette was inserted coding for expression of CD34 and GFP. The CD34, GFP, and downstream Zeocin resistance genes (ZeoR present in original plasmid) were separated by 2A motifs (T2A-2 or P2A) to allow for translation of three separate polypeptide chains. The CD34 sequence was sourced as a gBlock from IDT. The GFP sequence was sourced from ATUM (DasherGFP).

[0394] The GMP suspension CHO line CHOZN® GS−/− was obtained from Sigma Aldrich. Cells were sent to Bionova Scientific (Fremont, Calif.) to generate a working cell bank (WCB). A vial of cells from the WCB was thawed from LN2 and expanded. PMD-4681 was linearized using a restriction enzyme and purified via ethanol precipitation. Cells were then transfected with the FRT-GFP-Zeocin landing pad by random integration using Lonza's Nucleofector™ 4D, SE kit. Cells recovered overnight in an incubator and were plated the next day into minipools at 5,000 cells per well, across ten 96-well plates in selective media. The remaining cells were plated and selected together as a bulk pool control. Wells were fed every seven days until at least 80% confluency was reached.

[0395] A total of 236 minipools grew out and were screened in parallel for high GFP expression via flow cytometry and low copy number with a Copy Number Variation assay (CNV). Minipools with a copy number less than 2.5 and GFP expression at least 50% of the bulk pool were expanded into shaking adaptation. Expanded pools were also re-tested for GFP expression and confirmed via flow cytometry. Once minipools were expanded, vial aliquots were frozen down.

[0396] Minipool vials were thawed and allowed to recover. Cells were then adapted to a liquid counterpart of the semisolid media used for single cell cloning. Minipools were deemed fully adapted when cells would show consistent doubling times and high viability (>90%). Adapted cells were then plated into semisolid media for the Molecular Devices ClonePix3 single cell cloning platform. Single cell imaging was obtained on day 0 of cell plating in semisolid media to confirm monoclonality. Clonal cell colonies reached outgrowth in fourteen days. Clonal cell colonies were picked and deposited as one colony per well of a 96-well plate. Each clone was then expanded, re-adapted to selection media, and cryopreserved. Doubling times were calculated and clones with less than a 30-hour doubling time were chosen for further development. Expanded clones were retested for GFP expression and copy number.

[0397] Each clone was then transfected in duplicate using the BioRad Gene Pulser Xcell™ Total System with a monoclonal antibody (mAb)-cyan fluorescent protein (CFP) construct to test expression titer. Transfection conditions were optimized such that clonal lines were >90% viable at time of transfection and at least >70% viable post-transfection. CFP expression was evaluated via flow cytometry 3 days post transfection to determine relative transfection efficiency >35%. After full selection and recovery, cell lines were tested in a 10-day TPP (bioreactor tubes) shaking production run in duplicate. Titers for candidate cell lines ranged 50-100 mg/L. A single clone (CSS-1286) derived from minipool CSS-1144 was selected for further development.

[0398] Agilent SureSelect was used to confirm the number of copies and genome location of the landing pad in CSS-1286. SureSelect enriches for a targeted area of interest within the CHO genome and allows for high throughput sequencing using Illumina. In this case, the landing pad site was targeted for enrichment using custom probes.

[0399] Genomic DNA was extracted from CSS-1286 and fragmented for sequencing. Complementary oligonucleotide probes (“baits”), were designed to enrich target DNA sequences. When exposed to the genomic DNA library, the baits bound to the sequence of interest and were pulled down via magnetic bead enrichment. Illumina sequencing adapters were then added to the enriched DNA fragments and amplified via PCR, resulting in an enrichment of the fragments of interest. Fragments were analyzed on an Illumina MiSeq.

[0400] The data were analyzed using the Horizon Discovery CHO genome sequence as a reference. Sequences were mapped to the reference landing pad sequence. Any chimeric reads, sequences containing both partial landing pad sequences and CHO genome sequences were extracted and mapped back to the CHO genome. This allowed for identification of where the landing pad had inserted into the CSS-1286 genome.

[0401] To confirm copy number using an orthogonal method, CSS-1286 was sent to Cergentis for Targeted Locus Amplification (TLA) (Hottentot et al., 2007). Targeted DNA sequences close in physical space were crosslinked. The targeted sequences were then digested and then ligated back together, forming circles of DNA. Inverse PCR was performed, using the targeted sequence as the initial binding region for amplification. This created large libraries of DNA that were then be sequenced using Illumina sequencing. Sequences were then mapped back to the reference Horizon Discovery CHO genome to determine copy number and genome integration location. TLA and SureSelect identified the same single genome location.

[0402] Antibody Library Cloning

[0403] Generation of amplicon libraries comprised three steps: (i) poly(A)+ mRNA capture, (ii) multiplexed overlap extension reverse transcriptase polymerase chain reaction (OE-RT-PCR), and (iii) nested PCR to remove artifacts and add adapter sequences for Illumina sequencing or cloning into antibody expression vectors (FIGS. 2A and 2B).

[0404] First, PBMCs were collected from 50 human donors (median age 52; range 20-71), either presumed positive by symptoms or confirmed positive by nasal swab test (Roche) at the collection site. No follow-up nasal swab qPCR assay was required to show viral clearance. The median days since onset of symptoms was 23 days (range 12-42). Donors were consented under an IRB protocol by a CRO and shipped to GigaGen overnight at ambient temperature. The serum fraction was isolated for each of the 50 donors. Each serum was assayed for reactivity against SARS CoV-2 Spike protein and SARS CoV-2 RBD protein, using ELISA (FIGS. 3A-3D). 33 of the donors bound to Spike and/or RBD. The 16 highest titer donors were then selected for library generation (Library 1 to 8).

[0405] Next, PBMC samples from each of the 16 “high titer” donors were assayed the for SARS CoV-2 virus using CDC qPCR assays (FIGS. 3A-3D). None of the 16 donors showed any detectable SARS CoV-2 RNA. 1.5-2 million B cells were isolated from each of the 16 high titer donors into fluorocarbon oil (Dolomite) emulsion microdroplets with lysis buffer (20 mM Tris pH 7.5, 0.5 M NaCl, 1 mM EDTA, 0.5% Tween-20, and 20 mM DTT) and oligo(dT) beads (New England Biolabs Inc.; NEB), using an emulsion droplet microfluidic chip. Typically, >3 million single cells were processed per hour, with >99% of cell-containing droplets containing single cells. Beads were separated from the droplets using Pico-Break solution (Dolomite). Multiplex OE-RT-PCR was then performed in emulsions, using purified RNA-bound beads as template, to generate single chain variable fragment (scFv) amplicons that linked the heavy and light chain Ig from single B cells (Adler et al., 2017). Pools of 2 high titer donors were amplified in the emulsions, for a total of 8 emulsion reactions.

[0406] The OE-RT-PCR products were used as template in a nested PCR to add adapters for yeast surface display. S. cerevisiae cells (ATCC) were electroporated (Bio-Rad Gene Pulser II; 0.54 kV, 25 uF, infinite resistance) with the PCR product combined with a linearized vector for in vivo homologous recombination and inducible expression of scFv protein. Transformed yeast were expanded, induced with galactose, and approximately 2×10⁶ induced yeast cells were stained with anti-c-Myc (Thermo Fisher Scientific) followed by a FITC-conjugated secondary antibody (Thermo Fisher Scientific), and biotinylated SARS CoV-2 RBD or Spike (1200 nM final concentration) followed by APC-streptavidin (Thermo Fisher Scientific); an scFv library specific for an unrelated target was used as a negative control. Yeast cells were then sorted (BD Influx) and 20-30×10³ double-positive cells (FITC/APC+) were recovered. For further specificity, a second round of sorting using the same antigen was performed and 50×10³ double-positive yeast 2-donor library were recovered.

[0407] An average of 1.1% of the expressed antibodies were RBD-specific after the first sort, suggesting that most antibodies in the original convalescent COVID-19 repertoires are not specific to SARS CoV-2. Plasmid scFvs from each of the 8 sorted libraries were subjected to PCR to amplify the scFv and add adapters for Illumina sequencing. A randomer of seven nucleotides was added to increase base calling accuracy in subsequent Illumina sequencing steps. Sequencing on a MiSeq (Illumina) showed that each sorted library comprised a median of 129 antibodies (range: 83 to 209).

[0408] To convert the 8 sorted scFv libraries into full-length antibody libraries, a cloning pipeline was developed to convert the 8 scFv libraries into full-length CHO expression libraries (FIG. 4). First, nested outer PCR primers added adapters with overhangs for Gibson assembly to the 5′ and 3′ ends of the scFv library. Then Gibson Assembly (NEB) was used to insert the scFv library into a vector containing a single promoter, a secretory leader sequence for light chain Ig and the remainder of the IgG constant region, creating a cloned scFv library. To create the full-length antibody library, another Gibson Assembly was used to insert a synthetic amplicon containing a portion of the light chain Ig constant region, a poly(A) signal for light chain Ig, a promoter for the IgG gene and a secretory leader sequence for the IgG gene.

[0409] The base plasmid for antibody expression was derived from pCDNA5/FRT (ThermoFisher), with some modifications (FIG. 4). The original plasmid (purchased from ThermoFisher) contained a CMV promoter followed by the protein open reading frame and finally a BGH polyadenylation sequence. The assembled antibody expression plasmid (after the second Gibson Assembly) contains an EF1-alpha promoter (sourced from pEF1a-IRES, Takara Bio), followed by an H. sapiens IgG signal peptide, the IgK variable region sourced from the donor B cell, and the IgK constant region. Next is a BGH polyadenylation sequence (same sequence as in the original plasmid), followed by the CMV promoter (from the original plasmid), the IgG signal peptide, IgG variable region sourced from the donor B cell, IgG constant region and a second BGH polyadenylation sequence (from the original plasmid). The hygromycin resistance gene in the original plasmid was replaced with the glutamine synthetase gene (sourced from pCGS3, MilliporeSigma) preceded by a 2A motif.

[0410] The full-length rCIG plasmid libraries were then transformed en masse into E. coli and then spread on LB-carbenicillin plates. >1 million colonies were typically scraped and plasmid was purified with a Maxi prep kit (Qiagen) to make the full-length Maxi prep library, which was then transfected into parental CHO cells, as described below. RCB and MCB Generation

[0411] The 8 full-length rCIG library maxipreps were used to create 8 polyclonal RCBs, which could be used to produce RPP. First, a vial from the bank of parental CSS-1286 cells was thawed out and recovered. CSS-1286 cells were taken off Zeocin selection the day before transfection. CSS-1286 cells were co-transfected with the full-length rCIG library maxiprep and a recombinase plasmid using the Gene Pulser Xcell™ Total System in growth media. The host cell then expresses the Flp recombinase off the recombinase plasmid to promote recombination of each donor full-length rCIG library into the landing pad site of CSS-1286. Transfected cells were recovered in static flasks for 72 hours at 37° C., 5% CO₂ and then subjected to GS selection to produce stable pools of cells expressing rCIG antibodies. The cells were provided a media change with selective media every seven days for approximately 14 days until fully selected.

[0412] The selected cells were expanded and cryopreserved, generating 8 polyclonal rCIG RCBs, which could be used to produce RPP. Small-scale production of RPP in shake flasks was performed for each rCIG RCB, and the protein products were subjected to a battery of tests, including anti-SARS CoV-2 ELISA and a Spike:ACE2-inhibition ELISA. The anti-SARS CoV-2 binding ELISA showed that the scFv-sorted rCIG products were typically >10,000-fold more potent than plasma-derived IVIG, and ranged from 147- to 1,394-fold more potent binding than matched convalescent serum/plasma. The potential for SARS CoV-2 neutralization was assessed using a Spike:ACE2-inhibition ELISA and pseudotype neutralization assays. Preliminary results showed that neutralization was generally consistent between the ELISA and pseudotype neutralization methods. Plasma-derived IVIG showed no detectable neutralization. The scFv-sorted rCIG library products were 32.7-1,500-fold more potent than matched convalescent serum/plasma, generally consistent with the trends observed in the anti-SARS CoV-2 binding ELISA experiments. No library that was tested showed anti-RBC agglutination or anti-HLA reactivity.

[0413] A mixture of the 8 RCBs is prepared to generate an MCB for GMP production of RPPs, simultaneously maximizing antibody diversity and neutralizing activity, while retaining low off-target reactivity. The mixture of RCBs is generated by thawing the chosen RCBs and then mixing them at a predetermined ratio, i.e., not necessarily in equivalent ratios. A panel of assays is used to characterize rCIG drug candidate produced at small scale from the mixture of RCBs (FIGS. 5 and 6). The MCB is characterized using standard assays, including mycoplasma, adventitious viruses, hamster antibodies, and sterility. The MCB is also assessed for phenotypic stability using a standard cell aging protocol.

[0414] Bioproduction of rCIG

[0415] The MCB are expanded in a seed train. The seed train is used to inoculate large-scale bioreactors, for example, 200 L single use bioreactors (SUBs). Bioproduction of RPP is monitored for a variety of parameters, including viability, IgG titer, glucose, and metabolites. Bioproduction continues for 14 days or until cell viability drops below 80%. The harvested cell culture fluid (HCCF) is then be used for downstream purification.

[0416] The GMP downstream process is designed to selectively purify antibody from the harvested cell culture fluid (HCCF), and then further polish the material by removing residual host cell protein (HCP), aggregate, and other impurities. DNA and virus are also inactivated and removed, and the final material is formulated at the desired concentration in the final buffer.

[0417] The steps of downstream production include, e.g., standard Protein A purification; subjecting the eluant to a pH 3.5 hold for viral inactivation; and polishing using cation-exchange (CEX), anion-exchange (AEX), and viral clearance filters; ultrafiltration/diafiltration (UF/DF) and sterile filtration for final formulation of the drug substance.

[0418] Antibody RNA Sequencing for Process Monitoring

[0419] Currently, no technology exists to reliably quantify the individual protein components of mixtures of more than 1,000 proteins. As such, the individual antibody protein components of plasma-derived antibody products such as IVIG remain unknown. Using current technologies, antibody sequencing can only be performed on individual purified proteins, such as monoclonal antibodies. Therefore, lot release metrics for plasma-derived antibody products do not include antibody sequencing.

[0420] Like plasma-derived antibody products, rCIG comprise >1,000 different antibodies. Unlike plasma-derived antibody products, rCIG is manufactured from a CHO master cell bank that expresses RNA that encodes >1,000 different antibodies. Unlike protein sequencing, sequencing of RNA mixtures is technologically mature, very high-throughput, and quantitative. Therefore, Illumina sequencing of antibody RNA (“antibody RNA-seq”) expressed by CHO cells is used as a method to assesses antibody diversity at the end of bioproduction.

[0421] Small-scale (2.5-5 L) engineering runs are used to establish control ranges in the Jaccard and Morisita indices (Rempala & Seweryn, 2013) between the MCB and harvest day. The Jaccard metric assesses the overlap of antibody sequences between two given samples, whereas the Morisita index assesses the quantitative consistency of antibody sequences between two given samples. Thus, Jaccard assesses maintenance of antibody diversity, and Morisita assesses maintenance of antibody frequencies.

[0422] Sufficient replicates are performed to generate a median and standard deviation for Jaccard and Morisita indices from production runs that produce protein product above a critical minimal cutoff for rCIG potency. These ranges are used to monitor and assess GMP manufacturing at the 200 L scale.

### Example 3: Generation of Recombinant Hyperimmune Globulins from Diverse B-Cell Repertoires

[0423] Plasma-derived polyclonal antibody therapeutics, such as intravenous immunoglobulin, have multiple drawbacks, including low potency, impurities, insufficient supply and batch-to-batch variation. The present disclosure describes a microfluidics and molecular genomics strategy for capturing diverse mammalian antibody repertoires to create recombinant multivalent hyperimmune globulins. The method generates of diverse mixtures of thousands of recombinant antibodies, enriched for specificity and activity against therapeutic targets. Each hyperimmune globulin product comprised thousands to tens of thousands of antibodies derived from convalescent or vaccinated human donors or from immunized mice. Using this approach, Applicant generated hyperimmune globulins with potent neutralizing activity against severe acute respiratory syndrome coronavirus-2 (SARS-CoV-2) in under 3 months, Fc-engineered hyperimmune globulins specific for Zika virus that lacked antibody-dependent enhancement of disease, and hyperimmune globulins specific for lung pathogens present in patients with primary immune deficiency. To address the limitations of rabbit-derived anti-thymocyte globulin, Applicant generated a recombinant human version and demonstrated its efficacy in mice against graft-versus-host disease.

[0424] The technology described here generates recombinant hyperimmune globulins for diverse conditions through high-throughput microfluidics, genomics and mammalian cell engineering. B cells from human donors or mice are run through a microfluidic platform, heavy and light chain immunoglobulin nucleic acid sequences are fused on a single-cell level to create antibody repertoires, antibody repertoires are engineered into full-length expression constructs en masse, and then the full-length antibody expression constructs are stably introduced en masse into Chinese hamster ovary (CHO) cells in a site-directed manner. The technology disclosed herein was applied to develop 10³ to 10⁴ diverse recombinant hyperimmune globulin drug candidates to address unmet clinical needs for the COVID-19 pandemic, Zika virus disease, primary immune deficiency (PID) and transplant tolerance. The drug candidates were validated in vivo and/or in vitro for each of the four clinical applications.

### Results

[0425] Capturing Diverse Antibody Repertoires as CHO Libraries and RPPs

[0426] Mammalian antibody repertoires are extremely diverse, comprising as many as 10⁷ antibody clonotypes. Advanced molecular technology is required to capture a substantial fraction of a mammalian donor's diverse antibody repertoire. Applicant used methods for generating millions-diverse libraries of natively paired heavy and light chain immunoglobulin sequences in yeast. That method used microfluidics to isolate millions of single B cells per hour into picoliter droplets for lysis, followed by overlap extension-reverse transcriptase-polymerase chain reaction (OE-RT-PCR), to generate libraries of natively paired single chain variable fragments (scFv).

[0427] Because antibody repertoires often contain many antibodies not directed against the target(s) of interest, a variety of enrichment methods (FIG. 7A-7E) were used. For ATG, Zika virus, Haemophilus influenzae b (Hib) and Streptococcus pneumoniae (pneumococcus), immunogens were administered to human donors or humanized mice before sampling antibody-producing cells. For SARS-CoV-2, convalescent donors were recruited who recently tested positive for COVID-19, made yeast display scFv libraries from donor B cells and sorted the libraries derived from these donors to enrich for antibodies directed against SARS-CoV-2 antigen. In all cases, the output was a library of thousands to tens of thousands of natively paired scFv DNAs, enriched for activity against their respective target(s).

[0428] Next, each library of scFv DNAs was used to produce natively paired full-length antibody expression constructs, which were then engineered into mammalian cells for production of recombinant hyperimmune globulins (FIG. 7A-7E). Cloning into full-length antibody expression constructs was performed en masse, that is, to perform all molecular steps on full libraries rather than individual clones. Briefly, the protocol involved a series of two Gibson assemblies, which are referred to as Gibson assembly 1 (GA1) and Gibson assembly 2 (GA2) (FIGS. 12A and 12B). In GA1, the scFv library was inserted into a vector backbone that contained a promoter, a fragment of the IgG1 constant domain and a poly(A) signal. In GA2, the GA1 plasmid was linearlized, and subcloned it into a DNA fragment that contained a fragment of the IgK constant domain, a second poly(A) signal and a second promoter.

[0429] Production cell lines for monoclonal antibodies are typically produced by randomly inserting expression constructs into the CHO genome. This method produces cell lines with genomic insertion of multiple copies of the expression construct. If polyclonal antibody construct libraries are inserted randomly into the CHO genome, because each cell might contain several inserted transgenes, many clones would express multiple antibodies, which would result in frequent nonnative pairing between heavy and light chain immunoglobulin. Additionally, different genome locations have different transcriptional activity levels, which could result in heterogeneous, inconsistent and/or unstable bioproduction. Applicant therefore used CHO cell lines engineered with a Flp recombinase recognition target landing pad (FIG. 13E). These cell lines were then used for stable expression of recombinant hyperimmune globulins or RPPs in polyclonal cell banks.

[0430] Recombinant Hyperimmune Globulins or RPPs for SARS-CoV-2

[0431] To address the urgent unmet clinical need of the COVID-19 pandemic, methods provided herein were to build recombinant hyperimmune globulins against SARS-CoV-2, which is referred to as recombinant coronavirus-2 immune globulin, or rCIG. In March 2020, 50 human donors were recruited from a single clinic in Louisiana who either had tested positive for SARS-CoV-2 by nasal swab PCR testing or had shown symptoms of COVID-19 around the time of a major local outbreak. First, anti-SARS-CoV-2 plasma titer was assessed for each of the donors using the S1 and receptor binding domain (RBD) regions of SARS-CoV-2 spike glycoprotein (FIG. 8A and Table 6). A wide range of half-maximum effective concentration (EC₅₀) values was observed among patients who tested positive for COVID-19 (range 0.0056-9.94 mg ml⁻¹). 16 donors with high plasma antibody titers was selected and used to build yeast scFv display libraries from pools of two donors, for a total of eight libraries. The libraries comprised a median of 70,940 antibodies (range 54,986-156,592, Table 7).

[0432] Applicant used flow sorting to enrich for anti-SARS-CoV-2 antibodies in the eight yeast scFv libraries (FIG. 8B, FIG. 14A-14B and Table 7). One round of flow sorting suggested that a median of 0.99% of antibodies (range 0.42-2.29%) were directed against SARS-CoV-2. After two rounds of sorting, a median of 62.7% of unsorted antibody sequences were human IgG1 subtype (range 51.5-83.4%), whereas in the sorted libraries a median of 82.4% of antibody sequences were human IgG1 subtype (range 63.6-92.2%), suggesting that the COVID-19 antibody response was generally dominated by IgG1 antibodies. Next, full-length polyclonal antibody preparations were generated from each of the eight scFv libraries. The antibodies were formatted as human IgG1, regardless of the initial IgG subtype. Anti-SARS-CoV-2 enzyme-linked immunosorbent assay (ELISA), spike:ACE2 blocking assays and pseudotype and live virus neutralization assays were used to assess the relative activity of each of the eight antibody libraries (FIG. 8F, FIGS. 15 and 17A-17C and Table 7). The eight scFv-sorted CHO cell banks were used in a way that sought to balance high antibody diversity with high anti-SARS-CoV-2 pseudotype neutralization titer (Table 8) and used the combined cell bank to generate rCIG protein product (FIG. 18A-18B). In preparation for manufacturing rCIG for clinical trials, a comprehensive polishing strategy was developed. Stress testing showed that the polished protein quality and function was highly stable, suggesting that rCIG was amenable to large-scale manufacturing (FIG. 19A-19D). This entire process, from delivery of the first donor sample to laboratory-scale generation of the rCIG protein product, was completed in less than 3 months.

[0433] Antibody RNA sequencing of the final CHO cell bank indicated that the rCIG drug candidate comprised a diverse set of 12,500 antibodies (FIG. 8C and Table 9). Additional repertoire analysis of the linked scFv and CHO cell bank libraries for rCIG was performed, including variable gene usage frequency, divergence from germline, CDR3H length distribution and sequence logos of the most abundant clonal clusters (FIG. 20A-20D, FIG. 21A-21C). Anti-SARS-CoV-2 ELISA suggested that the binding titer of rCIG was between 99- and 747-fold higher than corresponding plasma (FIG. 8D, FIG. 15 and Table 7 and 9). ELISAs with several natural variants of SARS-CoV-2 and antigens from related viruses, including SARS-CoV and Middle East respiratory syndrome (MERS) CoV, showed that rCIG bound a broader variety of antigen targets than IVIG or a neutralizing CoV-2 monoclonal antibody (mAb; FIG. 8E, FIG. 22 and Table 9). SARS-CoV-2 pseudotype virus neutralization assay was performed with psudotype virus of several SARS-CoV-2 variants (B.1.1.7 (UK), B.1.351 (South Africa), P.1 (Japanese/Brazilian), and B.1.427/B.1.429 (California)). The result showed that rCIG neutralizes the psudotype virus of the variants in a concentration dependent matter, with an IC₅₀ within 6-fold of the IC₅₀ determined using the Wuhan-Hu-1 psudoviral particle (FIG.51 and FIG. 52). The rCIG RPP therefore has broad activity across variants against which individual monoclonal antibodies are not active.

[0434] Finally, spike:ACE2 blocking assays, pseudotype virus neutralization assays and live SARS-CoV-2 neutralization assays suggested that the neutralizing titer of rCIG was between 44- and 1,767-fold higher than corresponding convalescent plasma (FIG. 8F, FIGS. 16A and 16B, and Tables 7 and 9).

[0435] Antibody RNA sequencing of the CHO cells and SARS-CoV-2 ELISA binding and SARS-CoV-2 pseudotype neutralization of rCIG protein generated from replicate 3-1 bioreactor runs did not show significant batch-to-batch variation in antibody sequence content (Wilcoxon rank sum test, P>0.05) or in vitro pseudotype neutralization (Feltz and Miller's asymptotic test, P>0.05; FIGS. 23A and 23B).

[0436] Recombinant Hyperimmune Globulin or RPP for Zika Virus

[0437] To address the Zika pandemic, the method described herein was to build recombinant hyperimmune globulins or RPP against Zika virus, which is referred to as recombinant Zika immune globulin, or rZIG. To create rZIG RPP, human-transgenic mice (Trianni) was used that expressed a complete repertoire of human antibody sequences. The mice were immunized with Zika virus antigens (FIGS. 24A and 24B). To explore the ability to engineer an rZIG that would not exhibit antibody-dependent enhancement (ADE), a safety concern for anti-Zika therapeutic antibodies, Applicant additionally boosted with four inactivated dengue virus serotypes.

[0438] B cells from the immunized animals and microfluidics technology were used to create an scFv library of natively paired IgGs. The resulting scFv library comprised approximately 119,700 IgG-IgK clonotypes (Table 10). Because enrichment by flow sorting is time-consuming and makes (possibly inappropriate) choices about viral epitope targets, the potency of an rZIG product produced without enrichment by flow sorting was assessed. To this end, the unsorted scFv library and CHO engineering technology to create rZIG CHO cell banks with a wild type human IgG1 isotype (rZIG-IgG1) or a mutated human IgG1 with abrogated Fc receptor (FcR) binding (rZIG-LALA) were used. Antibody RNA sequencing of IgG sequences in the rZIG cell banks suggested that the rZIG-IgG1 comprised 33,642 antibodies and rZIG-LALA comprised 26,708 antibodies (FIG. 9A and Table 11). A Morisita overlap of 86% and a Jaccard overlap of 58% between the rZIG-IgG1 and rZIG-LALA libraries suggested that the cell banks comprised substantially similar antibody repertoires. Additional repertoire analysis of the linked scFv and CHO cell bank libraries for rZIG was performed, including variable gene usage frequency, divergence from germline, CDR3 length distribution and sequence logos of the most abundant clonal clusters (FIG. 25A-25D). Applicant used these CHO cell banks to produce rZIG-IgG1 and rZIG-LALA hyperimmune globulins at laboratory scale (FIG. 26A-26B, FIG. 27A-27B).

[0439] Anti-Zika virus ELISA showed that both rZIG-LALA and rZIG-IgG1 had >75-fold higher titers against Zika virus than a human Zika positive serum sample (FIG. 28 and Table 11). Both rZIG-LALA and rZIG-IgG1 had anti-dengue binding activity across four serotypes, with pooled EC₅₀ values showing strong correlation with anti-Zika EC₅₀ values (linear regression, R²=0.9993, F-statistic P<0.001; FIG. 9B, FIG. 29 and Table 10). In contrast, although both rZIG-LALA and rZIG-IgG1 had strong activity in a Zika pseudotype neutralization assay (FIG. 30), there was no correlation between Zika and pooled dengue neutralization (linear regression, R²=0.00271, F-statistic P>0.05; FIG. 9C and FIG. 31). Applicant investigated whether the abrogated Fc function of rZIG-LALA could decrease ADE in a Zika pseudotype virus assay (FIG. 32). Both Zika⁺ human serum and rZIG-IgG1 showed considerable ADE, whereas rZIG-LALA showed no detectable ADE (FIG. 9D). Antibody RNA sequencing of the CHO cells and anti-Zika virus ELISA binding of rZIG-IgG1 and rZIG-LALA protein generated from replicate bioproduction runs did not show significant batch-to-batch variation in antibody sequence content (Wilcoxon rank sum test, P>0.05), and batch-to-batch anti-Zika virus ELISA results were indistinguishable (FIG. 33A-33B).

[0440] IVIG Spike-In for Patients with Primary Immunodeficiencies

[0441] Plasma-derived IVIG acts as antibody replacement for patients with humoral primary immunodeficiencies (“PID”), who have low serum IgG titers. However, it has insufficient antipathogen activity for certain patients at-risk for PID. To address this unmet clinical need, Applicant manufactured recombinant hyperimmune globulins or RPPs directed against pneumococcus and Hib bacteria, designed as multivalent ‘spike-ins’ for plasma-derived IVIG, that is, recombinant Haemophilus immune globulin (rHIG) and recombinant pneumococcus immune globulin (rPIG). Note that rHIG and rPIG are not replacements for IVIG, but rather supplements meant to increase the efficacy of IVIG. A full recombinant replacement for IVIG would require much broader antipathogen activity.

[0442] Healthy human donors were recruited and administered vaccines directed against pneumococcus or Hib. Eight to nine days after vaccination, peripheral blood mononuclear cells (PBMCs) were collected and shipped to our microfluidics processing facility. B cells from the PBMCs were selected and millions of cells were run through the microfluidics platform (Table 12), and then the scFv libraries and the CHO engineering technology were used to create IgG1 CHO cell banks for rHIG and rPIG. Heavy chain antibody RNA sequencing of the cell banks indicated that rHIG comprised 49,206 IgG sequences and rPIG comprised 17,938 IgG sequences (FIG. 10A and Table 13 and 14). Additional repertoire analysis of the linked scFv and CHO cell bank libraries for rHIG and rPIG was performed, including variable gene usage frequency, divergence from germline, CDR3 length distribution and sequence logos of the most abundant clonal clusters (FIGS. 34A-34D and 35A-35D). These CHO cell banks were used to produce rHIG and rPIG hyperimmune globulins at laboratory scale (FIGS. 36A-36B and 37A-37B).

[0443] Anti-Hib ELISA indicated that rHIG had 233-fold higher titer than plasma-derived IVIG (FIG. 10B and Table 13). A serum bactericidal assay demonstrated that rHIG was strongly active against two different Hib strains, whereas no bactericidal activity was observed for plasma-derived IVIG (FIG. 10C, FIG. 38 and Table 13). An ELISA against a combination of 23 pneumococcus serotypes showed that rPIG has 85-fold higher titer than plasma-derived IVIG (FIG. 39 and Table 14). ELISA for individual pneumococcus serotypes showed that rPIG was at least fivefold higher titer than plasma-derived IVIG for 13 out of 16 serotypes measured, indicating broadly enriched multivalent reactivity and significantly higher than IVIG overall across all separate ELISAs combined (Wilcoxon signed rank test, P=0.00123; FIG. 10D and Table 14). Finally, semiquantitative serotype-specific opsonophagocytosis assays suggested that rPIG was as effective or more effective than plasma-derived IVIG at cell killing for 15 out of 16 serotypes tested, and had significantly higher activity than IVIG across all separate opsonophagocytosis assays combined (Wilcoxon signed rank test, P=0.00251; FIG. 10D and Table 14). Antibody RNA sequencing of the CHO cells and anti-Hib or antipneumococcal ELISA binding of rHIG or rPIG protein generated from replicate bioproduction runs, respectively, did not show significant batch-to-batch variation in antibody sequence content (Wilcoxon rank sum test, P>0.05), and batch-to-batch antipathogen ELISA results were indistinguishable (FIGS. 40A-40B and 41A-41B).

[0444] To simulate the potential clinical application, rHIG and rPIG were mixed in with plasma-derived IVIG (IVIG+rHIG/rPIG) at a ratio of 1:1:8 (rHIG:rPIG:IVIG), producing a product with 18.3-fold higher titer than plasma IVIG for Hib and 8.3-fold higher titer than plasma IVIG for a pool of 23 pneumococcus serotypes (FIG. 42A-42B and Table 15). A Hib mouse challenge model using IVIG+rHIG/rPIG as prophylactic treatment showed significantly lower bacterial loads in the blood (Welch t-test, P<0.001) and peritoneal fluid (Welch t-test, P<0.001) as compared to plasma IVIG alone (FIG. 10E).

[0445] Recombinant Human ATG RPP for Transplant Tolerance

[0446] To encourage tolerance of grafts, transplant physicians use a variety immunosuppressive drugs, such as rabbit-ATG, which is manufactured by injecting rabbits with human thymocytes and isolating antibodies from the rabbit serum. However, rabbit-ATG can cause allergic reactions and other complications in humans, and the drug shows significant variation in potency across lots. To improve on rabbit-ATG, a recombinant human ATG, or rhATG RPP, derived from transgenic mice that express human antibodies (Trianni) were used. The mice were immunized with either human T cells or human fetal thymocytes (FIG. 43A-43B). B cells from the immunized animals and the microfluidics technology were used to create four scFv libraries of natively paired IgGs: bone marrow cells from T-cell immunized mice, lymph node cells from T-cell immunized mice, lymph node cells from thymocyte immunized mice and spleen cells from thymocyte immunized mice. The resulting scFv libraries comprised a range of 13,314 to 34,324 IgG-IgK clonotypes (Table 16). Additional repertoire analysis of the linked scFv and CHO cell bank libraries for rhATG was performed, including variable gene usage frequency, divergence from germline, CDR3 length distribution and sequence logos of the most abundant clonal clusters (FIG. 44A-44D). The CHO engineering technology was used to make cell banks from each of the four libraries.

[0447] Protein from each of the CHO cell banks was produced, and then pooled in equal mass equivalents to create rhATG (FIG. 45A-45B). Sequencing of individual libraries suggests that the pool comprised 49,885 antibodies (FIG. 11A and Table 17). Then ELISA was performed for a panel of known cell surface antigen targets for rabbit-ATG and observed that rhATG bound several immune cell surface targets, but only a subset of the targets bound by rabbit-ATG (FIG. 46A-46B). To investigate further, in vitro cell killing assays were performed with human PBMCs, which showed that rhATG and rabbit-ATG were not significantly different in cell killing potency against cytotoxic T cells and helper T cells (linear mixed effects model, P>0.05), whereas rhATG is significantly stronger than rabbit-ATG at killing B cells (linear mixed effects model, P<0.01) but significantly weaker than rabbit-ATG at killing natural killer cells (linear mixed effects model, P<0.01; FIG. 11B). Anti-erythrocyte binding assays were also performed, which suggested that rhATG has less off-target activity than rabbit-ATG (FIG. 47).

[0448] The efficacy of rhATG in vivo was also studied, using a graft-versus-host (GVH) model in which human PBMCs were grafted onto immune-incompetent mice. Animals (n=8 per PBMC donor) were dosed with rhATG, rabbit-ATG or vehicle control, either every other day for 5 weeks starting 5 days after the PBMC graft, or only on days 5, 6 and 7 after the graft. Two different PBMC donors were tested for each dosing regimen. After 42 days, rhATG was not significantly different from rabbit-ATG for survival (log-rank pairwise tests, P>0.05) and was superior to vehicle control for survival (log-rank pairwise tests, P<0.001), in both dosing schemes across multiple PBMC donors (FIG. 11C and FIG. 48A-48B). In both dosing regimens across both PBMC donors, immune cell (CD45⁺) expansion was not significantly different between rhATG and rabbit-ATG (linear mixed effects model, P>0.05), whereas for the vehicle control immune cell counts were significantly higher than rhATG at day 9 (Wilcoxon rank sum tests, P<0.01; FIG. 11D and FIG. 49A-49B). The conclusion was that although rhATG and rabbit-ATG did not share identical antigen targets, the drugs had similar efficacy in vivo.

### Discussion

[0449] Applicant demonstrated the generation of multivalent, 10³ to 10⁴ diverse recombinant hyperimmune antibody drugs (RPPs) from convalescent human blood donors, vaccinated human blood donors and humanized mouse repertoires. The drug candidates were validated using in vitro and in vivo methods, highlighting their advantages over plasma-derived incumbents. The technology combines methods in microfluidics, genomics and mammalian cell engineering. Contrasted against previous methods for generating recombinant polyclonal antibodies, our drug candidates had hundreds-fold higher antibody diversity and therefore represented higher fractions of antigen-reactive repertoires. Their advantages over plasma-derived products include higher potency, the ability to scale production without collecting further donors, consistency of production and the ability to modulate pharmacologic problems such as ADE. The technology is fast, producing a master cell bank against a poorly characterized virus (SARS-CoV-2) in less than 3 months. The rCIG product (GIGA-2050) has now been manufactured at a good manufacturing practice (GMP) facility. GMP production was similar to the methods described in this study, except that upstream bioproduction was performed in a single use bioreactor at the 250-liter scale and downstream purification was scaled equivalently.

[0450] Emerging viruses are a constant and unpredictable threat to human health. In the past two decades alone, the world has seen outbreaks of Ebola virus, SARS, MERS, 2009 H1N1 swine flu, Zika Virus and SARS-CoV-2, among others. Notwithstanding recent successes in rapid development of SARS-CoV-2 prophylactic vaccines, previous vaccine development efforts required very long development timelines. Development of broadly neutralizing monoclonal antibodies is often confounded by the difficulty of identifying broadly neutralizing epitopes, and escape variants can emerge over time. Because of such issues, convalescent COVID-19 plasma emerged as a promising approach early in the COVID-19 pandemic. However, convalescent plasma is difficult to manufacture at scale because convalescent plasma supply is constrained and each plasma donor supplies enough therapeutic for only 1-2 patients. The conclusion was that rCIG was a promising alternative to COVID-19 convalescent plasma due to significantly higher potency against live virus (Wilcoxon rank sum test, P=0.02869) and the ability to scale GMP production without the need to recruit more donors.

[0451] Although Zika virus has been less widespread and less deadly than SARS-CoV-2, Zika can spread from mother to fetus in utero, resulting in birth defects such as microcephaly. As of July 2020, there was no FDA-approved vaccine or therapy for Zika virus. Zika virus disease is complicated by ADE, a phenomenon in which poorly neutralizing antibodies enhance viral infection by bringing virus particles to cells that express FcR. This problem is particularly troublesome for individuals who have been previously infected with dengue, a related flavivirus, since many anti-dengue antibodies are poor neutralizers against Zika virus and vice versa. ADE is a safety concern in the development of plasma-derived hyperimmune globulins and vaccines. The conclusion was that rZIG-LALA was a promising alternative to plasma-derived drugs, due to high neutralizing potency against Zika virus and complete abrogation of the risk of ADE.

[0452] Although plasma-derived IVIG reduces rates of serious infections in PID, many patients still suffer frequent serious infections that require hospitalization. In particular, about 78% of serious lung infections are caused by pneumococcus and Hib bacteria. Clinicians have improved outcomes by further increasing IVIG doses, suggesting that, however, bacterial species are often incredibly diverse; for example, there are 90 known pneumococcus serotypes, complicating therapeutic development. The conclusion was that a polyvalent IVIG+rHIG/rPIG product had strong potential to address unmet clinical needs in patients with PID through increased potency against key pathogens.

[0453] In 2019, nearly 40,000 solid organ transplants were performed in the USA alone (www.unos.org). Transplantation generally introduces at least some mismatch between the human leukocyte antigen genotypes of the donor and host. This frequently results in some host-versus-graft effects, leading to loss of the graft and other serious complications.The work provided herein suggested that rhATG could one day address unmet clinical needs in transplant tolerance.

[0454] Our technology for generating recombinant hyperimmune globulins combines the advantages of recombinant antibodies (purity, consistency, potency) with the advantages of plasma-derived antibodies (proven efficacy, diversity, polyvalence, in vivo affinity maturation). The study disclosed herein has shown how the technology can improve existing plasma-derived products such as IVIG and rabbit-ATG. Polyclonal antibodies contain drugs with different mechanisms of action, potentially increasing efficacy; for example, rCIG may contain some antibodies optimized to block binding of virus to ACE2 and other antibodies optimized to clear virus through complement fixation. In the future, our technology could be used to develop drugs with new mechanisms of action, for example, antitumor antibody mixtures or antiplasma cell mixtures to cure humoral-driven autoimmune disease. It could also be extended to develop recombinant polyclonal IgM or IgA. To strengthen readiness against future pandemics, recombinant hyperimmune globulin cell banks against the most pressing biodefense threats could be produced preemptively.

### Methods

[0455] Generating Paired Heavy and Light Chain Libraries

[0456] Generation of scFv libraries from antibody-producing cells comprises three steps: (1) poly(A)+mRNA capture, (2) multiplexed OE-RT-PCR) and (3) nested PCR. Briefly, a microfluidic device captures single cells in droplets with a mixture of lysis buffer and oligo dT beads (NEB). After the cell is lysed and messenger RNA is bound to the bead, the emulsion is broken and the mRNA-containing beads are purified. Next, an emulsion is created using OE-RT-PCR reagents including a pool of primers directed against the IgK C region, the IgG C region and all V regions (Table 18), and the mRNA-bound beads as a template. The emulsion is subjected to thermal cycling, which creates complementary DNA, amplifies the IgK and IgG variable regions and links them together in an scFv format. Then the emulsion is broken and the linked scFv DNA product is extracted and purified. The purified scFv product is then amplified using nested PCR to remove artifacts and add adapter sequences. Depending on the adapter sequences, the product can be used for deep sequencing, yeast display libraries or full-length CHO expression.

[0457] To convert the scFv libraries into full-length CHO expression libraries, nested outer PCR primers were first used to add adapters with overhangs for Gibson assembly to the 5′ and 3′ ends of the scFv library (for rCIG, this was done after yeast scFv display enrichment, as described in the next section). Then NEBuilder HiFi DNA Assembly Master Mix (NEB) was used to insert the scFv library into a vector containing a single promoter, a secretory leader sequence for light chain immunoglobulin and the remainder of the IgG1 constant region, creating a cloned scFv library (GA1 backbone, FIG. 12A-12E; GenBank accession number MW079271). This intermediate library (GA1 product, FIG. 12A-12E; example plasmid sequence provided as GenBank accession number MW079272) was transformed into E. coli and plasmids were purified by either (1) spreading onto LB-ampicillin plates, scraping 0.5-1 million colonies and pooling or (2) inoculating directly into LB-ampicillin broth and growing overnight. Plasmid purification was performed using ZymoPURE II Plasmid Maxiprep Kits (Zymo Research). To create the full-length antibody library, a second Gibson assembly was performed by linearizing the GA1 product with BamHI-HF (rHIG) or NheI-HF (rCIG, rPIG, rhATG and rZIG) (NEB) and using it as a vector to insert a synthetic amplicon (Supplementary FIG. 2, GenBank accession number MW079275) containing a portion of the light chain immunoglobulin constant region, a poly(A) signal for light chain immunoglobulin, a promoter for the IgG gene and a secretory leader sequence for the IgG gene. The full-length library was then transformed into E. coli and spread on LB-ampicillin plates. >0.5 million colonies were combined and plasmid was purified with a ZymoPURE II Plasmid Maxiprep Kits (Zymo Research) to make the full-length recombinant hyperimmune globulin maxiprep library for transfection (GA2 product, FIG. 13A-13E; example plasmid sequence provided as GenBank accession number MW079273). When the transformed E. coli were inoculated directly into LB-ampicillin medium, a small volume of cells was plated to calculate the total number of transformants. In some cases, ampicillin was used for both plates and medium, whereas in other cases carbenicillin was used instead of ampicillin. Paired heavy and light chain libraries were made only once from each sample.

[0458] Enrichment for Antigen Binders By Yeast scFv Display

[0459] Polyclonal COVID-19 scFv libraries were sorted to enrich for relevant sequences. Briefly, yeast surface display scFv libraries were generated using COVID-19 scFv DNA libraries and a custom yeast surface display vector transformed by electroporation into EBY100 yeast strain (MYA-4941, ATCC). Surface displayed scFv sequences include a C-terminal myc tag to identify scFv expression with 1 μl per sample of undiluted anti-myc primary (A21281, Thermo Fisher Scientific) and 1 μl per sample of undiluted AF488 secondary antibody (A11039; Thermo Fisher Scientific). Binding to antigen was identified by staining with soluble biotinylated SARS-CoV-2 RBD antigen (SPD-C82E9, Acro Biosystems) at 1,200 nM and APC-streptavidin (SA1005, Thermo Fisher Scientific). Stained yeast libraries were sorted on a FACSMelody (BD Biosciences, with BD fluorescent activated cell sorting (FACS) Chorus software v.1.3.3) and double positive (AF488⁺/APC⁺) cells were collected. The gating strategy is outlined in FIG. 14A-14B. The collected cells were expanded and sorted again to further enrich the libraries. After the second round of sorting, cells were expanded a third time before plasmid isolation with a Zymoprep Yeast Plasmid Miniprep kit (Zymo Research). The plasmid libraries were then used as template for barcoding PCR and subsequent analysis by deep sequencing (Illumina). Plasmid from twice-sorted libraries was used as template for PCR toward full-length CHO antibody expression. Yeast scFv sorting was performed only once from each yeast scFv library.

[0460] Bioproduction of rHIG and rhATG

[0461] Adapted Flp-In-CHO cells stably expressing antibody libraries were grown in media consisting of 90% BalanCD CHO Growth A Medium (Irvine Scientific), 9% Ham's F-12 (Thermo Fisher Scientific), 1% FBS (Thermo Fisher Scientific), 4 mM Glutamax (Thermo Fisher Scientific), 0.2% anticlumping agent (Irvine Scientific), 600 μg ml⁻¹ Hygromycin-B (Gemini Bio). Protein production was performed at either small (250 ml) or medium (5 l) scale. For small-scale production, cells were seeded at 1×10⁶ cells per ml into 50 ml of media in a 250 ml Erlenmeyer flask and grown at 37° C., 5% CO₂, 125 r.p.m. Cells were continually grown under these conditions and supplemented with 7.5 ml of CHO Feed 1 (Irvine Scientific) on days 2, 4 and 7 of the production run. Supernatant was harvested on days 8 or 9 by centrifugation followed by filtration through a 0.22-μm 250 ml filter bottle (MilliporeSigma) with a 1 μm prefilter (MilliporeSigma). Harvested cell culture fluid (HCCF) was stored at 4° C. (if less than 1 week) or at −80° C. (if more than 1 week) until Protein A purification. For medium-scale production, cells were grown in the same media. Cells were then seeded at 1×10⁶ cells per ml in 2.3 l in a 5 l flask (in duplicate, day 0). Each flask was fed with 345 ml of CHO Feed 1 (Irvine Scientific) on days 2 and 4 of the culture. Cultures were gathered on days 8 or 9. Each of the four rhATG protein libraries were produced separately. Bioproduction was performed twice each for rHIG and rhATG.

[0462] Bioproduction of rPIG, rZIG and rCIG

[0463] CSS-1286 CHO cells stably expressing antibody libraries were grown in media without glutamine (EX-CELL CHOZN Advanced, MilliporeSigma). Protein production was performed at either small (500 ml flask) or medium (5 l flask) scale. For small-scale production, cells were seeded at 0.5×10⁶ cells per ml into 100 ml media in a 500 ml Erlenmeyer flask and grown at 37° C., 5% CO₂, 125 r.p.m. Cells were continually grown under these conditions and supplemented with 15 ml of CHO Feed 1 (MilliporeSigma) on day 3, and 10 ml of CHO Feed 1 (MilliporeSigma) on days 6 and 8 of the production run. Starting on day 3, glucose was measured each day and supplemented to 6 g l⁻¹ if below 4 g l⁻¹. Supernatant was harvested after cell viability peak and before dropping below 70% viability between days 9 and 11, centrifuged and filtered through a 0.22-μm 250 ml filter bottle (MilliporeSigma) with a 1 μm prefilter (MilliporeSigma). HCCF was stored at 4° C. (if less than 1 week) or at −80° C. (if more than 1 week) until Protein A purification. For medium-scale production, cells were grown in the same media. Cells were seeded at 0.5×10⁶ cells per ml in 2.2 L in a 5 L flask (in duplicate, day 0). Each flask was fed with 330 ml of CHO Feed 1 (MilliporeSigma) on day 3 and 220 ml of CHO Feed 1 (MilliporeSigma) on days 6 and 8 of the production run. Starting on day 3, glucose was measured each day and supplemented to 6 g L⁻¹ if below 4 g l⁻¹. Cultures were gathered on days 10-12. Bioproduction was performed three times for rCIG and twice each for rZIG and rPIG.

[0464] Protein Production and Characterization

[0465] After harvest, HCCF was purified using MabSelect PrismA (Cytiva) using 1× PBS (Teknova) for running and wash buffer, 0.1 M Citrate, pH 3.0 (Teknova) for elution and 1 M sodium citrate pH 6.0 (Teknova) for neutralization. The protocol was 10 column volumes (CV) of equilibration, HCCF loading, 10 CV of washing and 5-10 CV of elution followed by cleaning-in-place with 1 M NaOH. HCCF was loaded with a 1-min residence time. Eluted material was neutralized to a pH of roughly 4.5 and centrifuged to remove any precipitation. This material was dialyzed into 0.2 M glycine, pH 4.5 (Teknova) using a 20K molecular weight cutoff dialysis cassette (Thermo Fisher Scientific) and optionally concentrated up to 30 mg ml⁻¹ using a 50 kDa molecular weight cutoff spin device (MilliporeSigma). Final material was sterilized with a 0.22 μm filter and quantified by A280 (NanoDrop, Thermo Fisher Scientific). For rhATG, each of the four libraries were purified by Protein A separately and then equally pooled based on mass.

[0466] Purity of the protein was determined by size-exclusion-HPLC. Here, 20 μg of material at 1 mg ml⁻¹ was injected over a 300 Å, 2.7 μm, 7.8×300 mm size-exclusion column (Agilent) using a mobile phase of 25 mM phosphate, 200 mM NaCl pH 7.0 with 10% acetonitrile at 1 ml min⁻¹. The percentage of monomer was determined by integrating the product peaks and reporting the percent area corresponding to roughly 150 kDa. The product was further characterized by running 2 μg on a 12% SDS-PAGE gel under reduced and nonreduced buffering conditions and imaged after staining with SimplyBlue SafeStain (Thermo Fisher Scientific).

[0467] Protein production was performed once for each of the bioproduction runs.

[0468] Statistical Analysis

[0469] All statistical tests were performed on nonnormalized data, two-sided without adjustments to type I error rates. A significance threshold of a=0.05 was used for all statistical tests. All statistical analyses were conducted using R v.3.6.2.

[0470] For FIG. 8F, a Wilcoxon rank sum test was used to compare the minimum concentration to achieve SARS-CoV-2 live virus neutralization between convalescent plasma measurements (n=16) and rCIG measurements (n=2).

[0471] For FIG. 9B, simple linear regression was used to calculate the coefficient of determination (R²) between Zika and dengue ELISA EC₅₀ values. EC₅₀ values for all dengue serotypes were pooled for the analysis. Significance of the regression model was determined using an F-statistic with 1 and 10 degrees of freedom (d.f.). All measurements were performed in a single experiment. No power analysis was carried out to predetermine an appropriate sample size for this experiment.

[0472] For FIG. 9C, simple linear regression was used to calculate the coefficient of determination (R²) between Zika and dengue pseudotype neutralization half-maximum inhibitory concentration (IC₅₀) values. IC₅₀ values for all dengue serotypes were pooled for the analysis. Significance of the regression model was determined using an F-statistic with 1 and 10 d.f. All measurements were performed in a single experiment. No power analysis was carried out to predetermine an appropriate sample size for this experiment.

[0473] For FIG. 10D, fold improvement over IVIG, by assay (ELISA or opsonophagocytosis) was tested using a one-sample Wilcoxon signed rank test, with the null hypothesis that the median equals 1, that is, H₀=1. For each assay, all individual serotypes were pooled a single Wilcoxon signed rank test. Values for each individual serotype were generated by dividing the mean of duplicate rPIG measurements by the mean of duplicate IVIG measurements. All measurements were performed in a single experiment. No power analysis was carried out to predetermine an appropriate sample size for this experiment.

[0474] For FIG. 10E, Welch's t-tests were used to compare colony forming units (CFU) Hib per ml between test groups and d.f. were 7.87 for IVIG+rHIG/rPIG (500 mg kg⁻¹) and 7.13 for IVIG+rHIG/rPIG (200 mg kg⁻¹) in peritoneal fluid, and were 10.87 for IVIG+rHIG/rPIG (500 mg kg⁻¹) and 8.03 for IVIG+rHIG/rPIG (200 mg kg⁻¹) in blood. All measurements were performed in a single experiment. No power analysis was carried out to predetermine an appropriate sample size for this experiment.

[0475] For FIG. 11B, linear mixed effects models were used to compute P values for each of the four cell types, with group and concentration as fixed effects and PBMC donor as a random effect to account for the dependence of repeated measures: the d.f. were 31 for each of the four models. All measurements were performed in a single experiment. No power analysis was carried out to predetermine an appropriate sample size for this experiment.

[0476] For FIG. 11C and FIG. 48A-48B, Kaplan-Meier survival models were fit on time to mortality and pairwise log-rank tests were performed to compare median survival between treatment groups. All measurements were performed in a single experiment. No power analysis was carried out to predetermine an appropriate sample size for this experiment.

[0477] For FIG. 11D and FIGS. 49A-49B, linear mixed effects models were used to compute P values for trends in CD45⁺ cell counts in each of the four GVH experiments (2 PBMC donors×2 drug dosing regimens=4 experiments) with day as a fixed effect and PBMC donor as a random effect to account for the dependence of repeated measures. A Wilcoxon rank sum test was used to compare CD45⁺ cell counts on day 9 for saline negative control versus rhATG and saline negative control versus rabbit-ATG, in each of the four GVH experiments (2 PBMC donors×2 drug dosing regimens=4 experiments). No power analysis was carried out to predetermine an appropriate sample size for this experiment.

[0478] For FIGS. 23A-23C, 33A-33B, 40A-40B and 41A-41B, it was assessed whether batch-to-batch variation was more significant than the variability inherent to the assays used to make the measurements.

[0479] For rCIG pseudotype neutralization assays (FIG. 23A-23C), Feltz and Miller's asymptotic test was used to determine whether the coefficient of variation of three bioproduction batch IC₅₀ measurements (18%) was different from the coefficient of variation of eight IC₅₀ measurements on a fourth bioproduction batch (17%).

[0480] To assess batch variation in antibody sequence content, the Wilcoxon rank sum test was used to test whether the Jaccard or Morisita indices from PCR replicates from each bioproduction batch came from the same populations as the Jaccard or Morisita indices among bioproduction batches. Sequencing was performed in a single experiment. No power analysis was carried out to predetermine an appropriate sample size for this experiment.

[0481] Data Availability

[0482] Plasmid and cloning insert sequences are available on GenBank (GA1 backbone, GenBank accession number MW079271; GA1 product, GenBank accession number MW079272; synthetic amplicon insert, GenBank accession number MW079275; GA2 product, example plasmid sequence provided as GenBank accession number MW079273; PMD-4681, GenBank accession number MW079274. Sequencing data are available in the Short Read Archive under project identifier PRJNA649279.

[0483] Methods

[0484] Sourcing Human Materials

[0485] Local ethical regulations were followed and informed consent was obtained for all human sample collection.

[0486] rCIG: A contract research organization (CRO; Access Biologics, New Orleans, La., USA) recruited under sample collection protocol #PRO00026464 (Advarra, Columbia, Md., USA) approved by Institutional Review Board (IRB) and included if donors were 12-46 days (average 24 days+/−14 days) from the onset of two or more COVID-19 symptoms (fever, cough, shortness of breath, sore throat, and pneumonia). Sixty mL of whole blood was collected in ACD tubes, de-identified, and transported overnight to GigaGen for processing. 16 donors with high SARS CoV-2 Spike antigen- specific antibodies by ELISA (as described below) were included in rCIG and were predominantly Caucasian (87.5%), female (75%), aged 49 (+/−17 years), collected 21 days (+/−6 days) from onset of symptoms, and were approximately equally distributed, with 6 donors with 2 symptoms, 6 donors with 3 symptoms, and 4 donors with 4 symptoms.

[0487] rHIG: A contract research organization (BloodCenter Wisconsin, Milwaukee, Wis., USA) vaccinated two donors (Donor 1, a 26-year-old Caucasian female, and Donor 2, a 21-year-old Asian male) with PedvaxHlB vaccine (Merck, Kenilworth, N.J., USA). Leukapheresis was performed eight or nine days later to obtain PBMCs. In parallel, plasma was isolated from separate blood draws on the day of leukapheresis and prior to vaccination. ELISA was performed against Hib (Alpha Diagnostics, San Antonio, Tex., USA; see methods below) on the plasma samples to confirm a response to the vaccine as compared to plasma from the same donors prior to vaccination. Sample collection protocols were approved by IRB protocol #PRO00028063 (Medical College of Wisconsin/Froedtert Hospital IRB) to GigaGen. Informed consent was obtained from all participants and samples were shipped to GigaGen de-identified.

[0488] rPIG: A contract research organization (AllCells, Alameda, Calif., USA) vaccinated three donors (Donor 1, 57-year-old Caucasian male; Donor 2, 44-year-old Caucasian male; Donor 3, 35-year-old Caucasian/Asian male) with Pneumovax®23 vaccine (Merck, Kenilworth, N.J., USA). 60 mL blood draw was performed eight days later. Plasma and pan-B cells were isolated from whole blood (see methods below). ELISA was performed against a mixture of all 23 pneumococcal polysaccharides (Alpha Diagnostics, San Antonio, Tex., USA; see methods below) on the plasma samples to confirm response to the vaccine. Sample collection protocols were approved by IRB protocol #7000-SOP-045 (Alpha IRB, San Clemente, Calif., USA) to AllCells. Informed consent was obtained from all participants and samples were shipped to GigaGen de-identified.

[0489] Processing Human Materials

[0490] For whole blood, PBMCs and plasma were isolated using density gradient centrifugation SepMate tubes with Lymphoprep medium (StemCell Technologies, Vancouver, BC, Canada). To isolate pan-B cells from PBMCs (from either whole blood or a leukopak), the Human EasySep Pan-B Cell Enrichment Kit (StemCell, Vancouver, BC, Canada) was used. After isolation, the cells were cryopreserved using CryoStor® CS10 (StemCell Technologies, Vancouver, BC, Canada). Immediately prior to generating paired heavy and light chain libraries, cells were thawed, washed in cold DPBS+0.5% BSA, assessed for viability with Trypan blue on a disposable hemocytometer (Bulldog Bio, Portsmouth, N.H., USA) or with AOPI on a Cellometer K2 (Nexcelom Bioscience, Lawrence, Mass., USA), and then re-suspended in 12% OptiPrepTM Density Gradient Medium (Sigma, St. Louis, Mo., USA) at 5,000-10,000 cells per This cell mixture was used for microfluidic encapslation as described below.

[0491] Immunization of Trianni Mouse® Mice

[0492] Local ethical regulations were followed for mouse immunizations, by Antibody Solutions IACUC (Sunnyvale, Calif., USA).

[0493] Humanized mice were engineered by Trianni (San Francisco, Calif., USA). Trianni mice were bred and obtained from Charles River Laboratories (Wilmington, Mass., USA). All mice were male and 12-15 weeks old at the start of the immunization process. Antibody Solutions (Santa Clara, Calif., USA) performed all Trianni Mouse immunizations. Local ethical regulations were followed for mouse immunizations by the Antibody Solutions IACUC. The mice were ear marked for identification by the breeder and housed in individually ventilated cages (Innovive, San Diego, Calif., USA) and racks with HEPA filtered air at a density of up to 5 mice per cage. The animal room was lighted entirely with artificial fluorescent lighting, with a controlled 12 h light/dark cycle (7 am to 7 pm light). The normal temperature and relative humidity ranges in the animal rooms were 20-22.2° C. and 30-70%, respectively. The animal rooms were set to have up to 10 air exchanges per hour. Sunnyvale municipal tap water and rodent chow (Teklad Global, Indianapolis, Ind., USA) were provided ad libitum.

[0494] rZIG: Two Trianni humanized mice were immunized consecutively weekly with Zika VLP, inactivated Dengue 1, inactivated Dengue 4, inactivated Dengue 3, then inactivated Dengue 2 with alhydrogel/muramyl dipeptide (ALD/MDP) adjuvant. Animals were checked for antibody titer and boosted with Zika VLPs without adjuvant 5 days before harvest (Antibody Solutions, Santa Clara, Calif., USA).

[0495] rhATG: Two Trianni humanized mice were immunized weekly with human thymocytes from 5 de-identified specimens acquired from a CRO (Vitalant Research Institute, San Francisco, Calif., USA) for 5 weeks with ALD/MDP adjuvant and boosted on week 6 without adjuvant. Three Trianni mice were immunized weekly for 5 weeks with Pan T cells (StemCell, Vancouver, Canada) in ALD/MDP isolated from PBMCs from 1 de-identified donor (StemCell), checked for an elevated antigen-specific antibody titer, and boosted with the same cells 5 days before harvest without adjuvant (Antibody Solutions, Santa Clara, Calif., USA).

[0496] After sacrifice, spleen, lymph nodes, and/or bone marrow were harvested and processed into a single cell suspension. Samples from multiple mice were pooled together by tissue and pan-B cells were isolated from spleen and lymph node tissue using the EasySep Mouse Pan-B Cell Enrichment Kit (StemCell Technologies, Vancouver, BC, Canada). CD138+ cells were isolated from bone marrow using Miltenyi CD138+ mouse microbeads (Miltenyi, Bergisch Gladbach, Germany). After isolation, the cells were cryopreserved using CryoStor® CS10 (StemCell Technologies, Vancouver, BC, Canada).

[0497] Generating Paired Heavy and Light Chain Libraries

[0498] Generation of scFv libraries from antibody-producing cells (Adler et al., 2017) comprises three steps: (i) poly(A)+ mRNA capture, (ii) multiplexed overlap extension reverse transcriptase polymerase chain reaction (OE-RT-PCR), and (iii) nested PCR. Briefly, a microfluidic device captures single cells in droplets with a mixture of lysis buffer and oligo dT beads (NEB, Ipswich, Mass., USA). After the cell is lysed and mRNA is bound to the bead, the emulsion is broken, and the mRNA-containing beads are purified. Next, an emulsion is created using OE-RT-PCR reagents and the beads as template. The emulsion is subjected to thermal cycling which creates cDNA, amplifies the IgK and IgG variable regions, and links them together in an scFv format. Then the emulsion is broken and the linked scFv DNA product is extracted and purified. The purified scFv product is then amplified using nested PCR to remove artifacts and add adapter sequences. Depending on the adapter sequences, the product can be used for deep sequencing, yeast display libraries, or full-length CHO expression.

[0499] To convert the scFv libraries into full-length CHO expression libraries, nested outer PCR primers were first used to add adapters with overhangs for Gibson assembly to the 5′ and 3′ ends of the scFv library (for rCIG, this was done after yeast scFv display enrichment, as described in the next section). Then NEBuilder HiFi DNA Assembly Master Mix (NEB, Ipswich, Mass., USA) was used to insert the scFv library into a vector containing a single promoter, a secretory leader sequence for light chain Ig and the remainder of the IgG1 constant region, creating a cloned scFv library. This intermediate library was transformed into E. coli and plasmids were purified by either (a) spreading onto LB-ampicillin plates, scraping 0.5-1 million colonies and pooling or (b) inoculating directly into LB-ampicillin broth and growing overnight. Plasmid purification was performed using ZymoPURE II Plasmid Maxiprep Kits (Zymo Research, Irvine, Calif., USA). To create the full-length antibody library, a second Gibson assembly was performed by linearizing the product of GA1 with BamHI-HF (rHIG) or Nhel-HF (rCIG, rPIG, rhATG, and rZIG) (NEB, Ipswich, Mass., USA) and using it as a vector to insert a synthetic amplicon containing a portion of the light chain Ig constant region, a poly(A) signal for light chain Ig, a promoter for the IgG gene and a secretory leader sequence for the IgG gene. The full-length library was then transformed into E. coli and spread on LB-ampicillin plates. >0.5 million colonies were combined and plasmid with a ZymoPURE II Plasmid Maxiprep Kits (Zymo Research, Irvine, Calif., USA) was purified to make the full-length recombinant hyperimmune maxiprep library for transfection. When the transformed E. coli were inoculated directly into LB-ampicillin broth, a small volume of cells was plated to calculate the total number of transformants. In some cases ampicillin was used for both plates and broth, in other cases carbenicillin was used instead. Paired heavy and light chain libraries were made only once from each sample.

[0500] Enrichment for Antigen Binders By Yeast scFv Display

[0501] Polyclonal COVID-19 scFv libraries were sorted (Adler et al., 2017) to enrich for relevant sequences. Briefly, yeast surface display scFv libraries were generated using COVID-19 scFv DNA libraries and a custom yeast surface display vector transformed by electroporation into EBY100 yeast strain (MYA-4941; ATCC, Manassas, Va., USA). Surface displayed scFv sequences include a C-terminal myc tag to identify scFv expression with an anti-myc primary (A21281; Thermo Fisher Scientific, Waltham, Mass., USA) and AF488 secondary antibody (A11039; Thermo Fisher Scientific, Waltham, Mass., USA). Binding to antigen was identified by staining with soluble biotinylated SARS CoV-2 receptor binding domain antigen (SPD-C82E9; Acro Biosystems, Newark, Del., USA) at 1200 nM and APC-streptavidin (SA1005; Thermo Fisher Scientific, Waltham, Mass., USA). Stained yeast libraries were sorted on a FACSMelody (BD Biosciences, San Jose, Calif., USA) and double positive (AF488+/APC+) cells were collected. The gating strategy is outlined in Supplementary Figure S2. The collected cells were expanded and sorted again to further enrich the libraries. After the second round of sorting, cells were expanded a third time prior to plasmid isolation with a Zymoprep Yeast Plasmid Miniprep kit (Zymo Research, Irvine, Calif., USA). The plasmid libraries were then used as template for barcoding PCR and subsequent analysis by deep sequencing (Illumina, San Diego, Calif., USA). Plasmid from twice-sorted libraries was used as template for PCR towards full-length CHO antibody expression. Yeast scFv sorting was performed only once from each yeast scFv library.

[0502] Cell Line Used for rHIG and rhATG

[0503] The adherent Flp-In™-CHO cell line with a genetically integrated FRT site (Thermo Fisher Scientific, Waltham, Mass., USA) was adapted to suspension culture. For all steps in the adaptation process, “Ham's F-12” refers to Ham's F-12 (with L-glutamine, Thermo Fisher Scientific, Waltham, Mass., USA) plus 10% FBS (Thermo Fisher Scientific, Waltham, Mass., USA), and “BalanCD” refers to BalanCD CHO Growth A (Irvine Scientific, Santa Ana, Calif., USA) with 4 mM Glutamax (Thermo Fisher Scientific, Waltham, Mass., USA). To adapt this cell line to suspension, the cells were first passaged into a mixture of 50% Ham's F-12 plus 50% BalanCD in T-flasks. Cells were next passaged into 25% Ham's F-12 plus 75% BalanCD and switched to shaking Erlenmeyer flasks. Cells were then passaged into 10% Ham's F-12, 90% BalanCD+0.2% anti-clumping agent (Irvine Scientific, Santa Ana, Calif., USA) and banked for future use.

[0504] Approximately 100 million of the adapted Flp-In CHO cells were transfected per recombinant hyperimmune globulin library using an Amaxa Nucleofector 4D (SG buffer, pulse DU133; Lonza, Basel, Switzerland). These cells were plated into shaking Erlenmeyer flasks and recovered in an incubator at 37° C., 5% CO₂, 125 rpm. After 48 hours, the cells were counted to determine viability, cells were seeded at 1 million cells/mL, and selection was started using 600 μg/mL Hygromycin-B (Gemini Bio, West Sacramento, Calif., USA) in fresh media. Cells were counted and media was changed every 2-3 days during the 7-day selection. The libraries were kept on 600 μg/mL Hygromycin-B (Gemini Bio, West Sacramento, Calif., USA) during expansion until viability exceeded 95%. When cells were >95% viable and doubling every 24 hours, the adapted Flp-In™-CHO cell line was banked for liquid nitrogen storage. Before banking, cells were sampled from each library, RNA was purified, and antibody RNA-seq (Illumina, San Diego, Calif., USA) was performed to assess the diversity of the libraries (Table 13 and 17).

[0505] Cell Line Used for rPIG, rZIG, and rCIG

[0506] A landing pad construct (FIG. 13E, PMD-4681; GenBank accession number MW079274) was designed and cloned at GigaGen. PMD-4681 was based on pFRT-lacZeo (Thermo Fisher Scientific, Waltham, Mass., USA), with some modifications. In place of the LacZ expression construct a cassette was inserted coding for expression of CD34 and GFP. The CD34, GFP, and downstream Zeocin resistance genes (ZeoR present in pFRT-lacZeo) were separated by 2A motifs (T2A or P2A) to allow for translation of three separate polypeptide chains. The CD34 sequence was sourced as a gBlock from IDT (Coralville, Iowa, USA). The GFP sequence was sourced from ATUM (DasherGFP; Newark, Calif., USA).

[0507] The GMP suspension CHO line CHOZN® GS−/− was obtained from MilliporeSigma (St. Louis, Mo., USA). PMD-4681 was linearized using ScaI-HF and purified via ethanol precipitation. Cells were transfected with the linearized DNA using Amaxa Nucleofector 4D, SE kit, pulse CM-150 (Lonza, Basel, Switzerland). Cells recovered overnight in an incubator and were plated the next day into minipools at approximately 5,000 cells per well, across ten 96-well plates in selective media. The remaining cells were plated and selected together as a bulk pool control. Wells were topped off with fresh media every seven days until at least 80% confluency was reached.

[0508] A total of 236 minipools grew out and were screened in parallel for high GFP expression via flow cytometry and low copy number with a quantitative PCR Copy Number Variation (CNV) assay. Minipools with a copy number less than 2.5 and GFP expression at least 50% of the bulk pool were expanded into shaking adaptation. Expanded pools were re-tested for GFP expression via flow cytometry.

[0509] Cells were then adapted to BalanCD CHO Growth A in preparation for plating into semi-solid media. Minipools were deemed fully adapted when cells showed consistent doubling times and high viability (>90%). Adapted cells were plated into semisolid media for the Molecular Devices (Fremont, Calif., USA) ClonePix3 single cell cloning platform. Single cell imaging was obtained on day 0 of cell plating in semisolid media to confirm monoclonality. After 14 days, clonal cell colonies were picked and deposited as one colony per well of a 96-well plate. Each clone was then expanded, re-adapted to selection media, and cryopreserved. Doubling times were calculated and clones with less than a 30-hour doubling time were chosen for further development. Expanded clones were retested for GFP expression and copy number.

[0510] Remaining clones were transfected in duplicate using the Gene Pulser Xcell Total System (BioRad, Hercules, Calif., USA) per guidelines from MilliporeSigma (St. Louis, Mo., USA) for use with CHOZN GS with a monoclonal antibody (mAb)-cyan fluorescent protein (FrostyCFP, ATUM, Newark, Calif., USA) construct to test expression titer. CFP expression was evaluated via flow cytometry 3 days post transfection to confirm transfection efficiency >35%. After full selection and recovery, cell lines were tested in a 10-day fed batch TPP shaking production run in duplicate. Titers for candidate cell lines ranged from 50-100 mg/L. A single clone (CSS-1286) was selected to use for recombinant hyperimmune expression.

[0511] For transfection of recombinant hyperimmune globilins into CSS-1286, approximately 50 million cells were transfected per recombinant hyperimmune globulin library using the BioRad Gene Pulser Xcell Total System (Hercules, Calif., USA), per guidelines from MilliporeSigma (St. Louis, Mo., USA) for use with CHOZN GS. The cells were plated into T-75 flasks (approximately 10 million cells per flask) and recovered in an incubator at 37° C., 5% CO₂ for 72 hours. After 72 hours, the cells were counted to determine viability and then seeded into 100 mL fresh media without glutamine (EX-CELL CD CHO Fusion, MilliporeSigma, St. Louis, Mo., USA) in a 500 mL Erlenmeyer flask. Cells were counted and media was changed every 2-3 days during the ˜14-day selection. When cells were >95% viable and doubling every 24 hours, the cell line was banked for liquid nitrogen storage. Before banking, cells were sampled from each library, RNA was purified, and antibody RNA-seq (Illumina, San Diego, Calif., USA) was performed to assess the diversity of the libraries (Tables 9, 11, 14).

[0512] Bioproduction of rHIG and rhATG RPP

[0513] Adapted Flp-In™-CHO cells stably expressing antibody libraries were grown in media consisting of 90% BalanCD CHO Growth A Medium (Irvine Scientific, Santa Ana, Calif., USA), 9% Ham's F-12 (Thermo Fisher Scientific, Waltham, Mass., USA), 1% FBS (Thermo Fisher Scientific, Waltham, Mass., USA), 4 mM Glutamax (Thermo Fisher Scientific, Waltham, Mass., USA), 0.2% anti-clumping agent (Irvine Scientific, Santa Ana, Calif., USA), 600 μg/mL Hygromycin-B (Gemini Bio, West Sacramento, Calif., USA). Protein production was performed at either small (250 mL) or medium (5 L) scale. For small-scale production, cells were seeded at 1×10⁶ cells/mL into 50 mL media in a 250 mL Erlenmeyer flask and grown at 37° C., 5% CO₂, 125 rpm. Cells were continually grown under these conditions and supplemented with 7.5 mL CHO Feed 1 (Irvine Scientific, Santa Ana, Calif., USA) on Days 2, 4 and 7 of the production run. Supernatant was harvested on Day 8 or 9 by centrifugation followed by filtration through a 0.22 μm 250 mL filter bottle (MilliporeSigma, St. Louis, Mo., USA) with 1 μm pre-filter (MilliporeSigma, St. Louis, Mo., USA). Harvested cell culture fluid (HCCF) was stored at 4° C. (if less than 1 week) or at −80° C. (if more than one week) until Protein A purification. For medium-scale production, cells were grown in the same media. Cells were then seeded at 1×10⁶ cells/mL in 2.3 L in a 5 L flask (in duplicate; Day 0). Each flask was fed with 345 mL CHO Feed 1 (Irvine Scientific, Santa Ana, Calif., USA) on Days 2 and 4 of the culture. Cultures were harvested on Day 8 or 9. Each of the four rhATG protein libraries were produced separately.

[0514] Bioproduction of rPIG, rZIG, and rCIG RPP

[0515] CSS-1286 CHO cells stably expressing antibody libraries were grown in media without glutamine (EX-CELL CHOZN Advanced; MilliporeSigma, St. Louis, Mo., USA). Protein production was performed at either small (250 mL) or medium (5 L) scale. For small-scale production, cells were seeded at 0.5×10⁶ cells/mL into 100 mL media in a 500 mL Erlenmeyer flask and grown at 37° C., 5% CO₂, 125 rpm. Cells were continually grown under these conditions and supplemented with 15 mL CHO Feed 1 (MilliporeSigma, St. Louis, Mo., USA) on Day 3, and 10 mL CHO Feed 1 (MilliporeSigma, St. Louis, Mo., USA) on Days 6 and 8 of the production run. Starting on Day 3, glucose was measured each day and supplemented to 6 g/L if below 4 g/L. Supernatant was harvested after cell viability peak and before dropping below 90% viability between Days 9-11, centrifuged and filtered through a 0.22 μm 250 mL filter bottle (MilliporeSigma, St. Louis, Mo., USA) with 1 μm pre-filter (MilliporeSigma, St. Louis, Mo., USA). HCCF was stored at 4° C. (if less than 1 week) or at −80° C. (if more than one week) until Protein A purification. For medium-scale production, cells were grown in the same media. Cells were seeded at 0.5×10⁶ cells/mL in 2.2 L in a 5 L flask (in duplicate; Day 0). Each flask was fed with 330 mL CHO Feed 1 (Millipore Sigma, St. Louis, Mo., USA) on Day 3 and 220 mL CHO Feed 1 (MilliporeSigma, St. Louis, Mo., USA) on Days 6 and 8 of the production run. Starting on Day 3, glucose was measured each day and supplemented to 6 g/L if below 4 g/L. Cultures were harvested on Day 10-12.

[0516] RPP Protein Production and Characterization

[0517] After harvest, HCCF was purified using a 1 mL or 5 mL HiTrap Mab Select PrismA Protein A Column (GE Life Sciences, Marlborough, Mass., USA) using the following buffers: 1× PBS pH 7.0-7.4 (Teknova, Hollister, Calif., USA) for running and wash buffer, 0.1 M Citrate Buffer, pH 3.0 (Teknova, Hollister, Calif., USA) for elution buffer, 1 M Sodium Citrate, pH 6.0 (Teknova, Hollister, Calif., USA) for neutralization. The column was washed at 10 mL/min until UV was stable, then sample was injected at 5 mL/min. The column was washed with 10 column volumes at 10 mL/min. Protein was eluted using elution buffer at 5 mL/min, collecting 1 mL fractions. Fractions were then pooled. Pooled sample was neutralized slowly using 1 M Sodium Citrate to a pH of ˜5.0. Neutralized sample was centrifuged at 5000×g to remove any precipitation, then dialyzed overnight into 0.2 M glycine, pH 4.5 (Teknova, Hollister, Calif., USA) using a 20K MWCO Dialysis Cassette (Thermo Fisher Scientific, Waltham, Mass., USA). Buffer was changed once, then sample was removed, spun down to remove any precipitant, filtered through a 0.22 μm filter and quantified by A280 (NanoDrop; Thermo Fisher Scientific, Waltham, Mass., USA). For rhATG, each of the four libraries were purified by Protein A separately and then equally pooled based on mass.

[0518] Purity of the protein was determined by SEC-HPLC. 20 μg of material at 1 mg/mL was injected over a 300 Å, 2.7 μm, 7.8×300 mm size exclusion column (Agilent, Santa Clara, Calif., USA) using a mobile phase of 25 mM phosphate, 200 mM NaCl pH 7.0 with 10% acetonitrile at 1 mL/min. The percent monomer was determined by integrating the product peaks and reporting the percent area corresponding to ˜150 kDa. The product was further characterized by running 2 μg on a 12% SDS-PAGE gel under reduced and non-reduced buffering conditions, and imaged after staining with SimplyBlue SafeStain (Thermo Fisher Scientific, Waltham, Mass., USA).

[0519] Medium-Scale Production, Polishing, and Stress Testing of rCIG

[0520] For bioreactor production at 3 L scale, a seed train protocol was devised to mimic the number of passages required for production at up to 2,000 L scale. For each bioreactor production run, a single vial of rCIG cell bank was thawed at 37° C. and the contents of the vial were transferred to 10 mL of EX-CELL CD CHO Fusion media (MilliporeSigma, St. Louis, Mo., USA). The cells were then centrifuged for 5 minutes at 500×g. The supernatant was aspirated and discarded, and the cells were re-suspended in 5 mL of EX-CELL CD CHO Fusion. The entire volume of cells was seeded into a 250 mL non-baffled, vented shake flask at a final volume of 50 mL. The shake flask was incubated at 37° C., 5% CO₂, ≥80% humidity and 125 RPM (25 mm orbital diameter). Three days post thaw the viable cell density (VCD) was 4.0-6.0×10⁶ vc/mL with a viability ≥90%. At this point the cells were passaged using EX-CELL CD CHO Fusion into a 1000 mL shake flask at a seeding density of 0.4×10⁶ vc/mL. In a similar manner, the culture was passaged once more into a 1000 mL shake flask, and then two more times into 1000 mL spinner flasks. The final passage before bioreactor inoculation was done in EX-Cell Advanced CHO Fed Batch media (Millipore Sigma, St. Louis, Mo., USA).

[0521] Three days after completing the fifth passage, three 3 L Mobius single-use bioreactors (MilliporeSigma, St. Louis, Mo., USA) were seeded using the culture. Each bioreactor was prepared with 1300 mL of EX-Cell Advanced CHO Fed Batch media and then seeded at a VCD of 0.4±0.1×10⁶ vc/mL. Additional media was added if required to have an initial working volume of 1600 mL. Each bioreactor was controlled using the following set points: temperature setpoint Days 0-4 setpoint 37° C.; temperature Days 4-14 setpoint 32° C.; dissolved oxygen setpoint 30%; pH Days 0-3 7.0±0.2; pH Days 3-14 7.0±0.1. EX-Cell Advanced CHO Feed (MilliporeSigma, St. Louis, Mo., USA) and Cellvento 4Feed COMP (MilliporeSigma, St. Louis, Mo., USA) were added on Days 3, 5, 7, 9, and 11. Feed volumes were determined as a percentage of the current bioreactor volume, such that EX-Cell Advanced CHO Feed was added at 4% of the volume of the bioreactor and Cellvento 4Feed COMP was added at 2% of the volume of the bioreactor. Glucose levels were monitored daily, and starting on Day 3 were maintained above 4 g/L by adding a 45% Glucose solution until levels reached 6 g/L. The bioreactors were harvested after 14 days of culture. 5-10 million cells were collected from each bioreactor for antibody repertoire sequencing (FIG. 23A-23B).

[0522] For purification and polishing, an empty column was packed with MabSelect Sure PrismA resin (Cytiva, Marlborough, Mass., USA) and equilibrated with 20 mM phosphate, 150 mM NaCl, pH 7.4. Harvested cell-culture fluid was loaded at 20-40 g/L, washed with 20 mM phosphate, 500 mM NaCl, pH 7.4 and 50 mM phosphate, pH 6.0, and eluted with 50 mM sodium acetate, pH 3.5. The pH of the Protein A eluate was adjusted to 3.5 using 1 M acetic acid and the material was subjected to a 1 hour viral hold, after which it was adjusted to pH 5 using 1 M Tris-HC1, pH 9 and filtered to remove particulate. A second column was packed with POROS XS (Thermo Fisher Scientific, Waltham, Mass., USA) cation exchange (CEX) resin and equilibrated with 50 mM sodium acetate, pH 5.0. The filtered neutralized low pH hold pool was loaded on this column at 14-21 g/L, washed with 50 mM sodium acetate, 100 mM sodium chloride, pH 5.0, and eluted over a 20 CV gradient to 50 mM sodium acetate, 400 mM sodium chloride, pH 5.0. The product eluted with several distinct peaks, of which only the first was collected. The pooled CEX eluate was diluted with 20 mM tris-acetate, pH 7.4 to <8 mS/cm, then flowed through a Sartobind Q (Sartorious, Gottingen, Germany) anion-exchange membrane. The flowthrough was concentrated using a 30K molecular weight cutoff cellulose acetate tangential flow filtration cartridge (MilliporeSigma, St. Louis, Mo., USA), then diafiltered with 200 mM glycine pH 4.5 and sterile-filtered.

[0523] For stress testing, polished rCIG at 15 mg/mL in 200 mM glycine, pH 4.5 was incubated at 40° C. for 14 days. Separately, aliquots were subjected to 3 or 25 freeze-thaw cycles in a −80° C. freezer or dry ice/ethanol bath. The stressed samples were run on SEC-HPLC and SARS CoV-2 S1 ELISA and compared to a control that was stored at 4° C.

[0524] Deep Antibody Repertoire Sequencing

[0525] Deep antibody sequencing libraries were prepared as described previously (Adler et al., 2017), quantified using a KAPA quantitative PCR Illumina Library Quantification Kit (Roche, Mannheim, Germany), and diluted to 17.5 pM. Libraries were sequenced on a MiSeq (Illumina, San Diego, Calif., USA) using a 500 cycle MiSeq Reagent Kit v2, according to the manufacturer's instructions. To make sequencing libraries, tailed-end PCR was used to add Illumina sequencing adapters to the 5′ and 3′ ends of the constructs of interest. For scFv libraries (after droplet emulsion breaking or yeast plasmid isolation), a forward read of 340 cycles was used to capture the light chain CDR3 sequence, and a reverse read of 162 cycles was used to capture the linked heavy chain CDR3 sequence. For CHO libraries, the full-length heavy chain sequence was obtained using overlapping forward and reverse reads of 251 cycles. To determine the number of antibody clones in the final CHO cell libraries and for generating the clonal cluster analysis figures, 5-10 million CHO cells were harvested prior to a production run. For the batch-to-batch variation analysis, 5-10 million CHO cells were harvested at the conclusion of the replicate production runs, and a median of 855,746 sequence reads were obtained for each sequencing library (range: 658,013 to 1,113,968).

[0526] To determine the Fc subtype of a library, the heavy chain was amplified with a primer that binds further into the constant domain to add the Illumina sequencing adapter to the 3′ end; the first 60 bp of the constant domain was sequenced to determine the subtype, which was linked to the corresponding CDR3H that was simultaneously sequenced. Each library was sequenced one time.

[0527] Sequence analysis, including error correction, reading frame identification, and FR/CDR junction calls was performed using our previously reported bioinformatics pipeline (Adler et al., 2017). Reads with E>1 (E is the expected number of errors) were discarded, to retain sequences for which the most probable number of base call errors is zero. Clones are defined as sequences with unique CDR3 amino acid sequences (CDR3K+CDR3H for scFv clones, CDR3H only for CHO clones). A more conservative clone count is also provided (combined CDR3), where unique clones were combined if they had 1 amino acid difference for 5-6 amino acid long CDR3s, or if they had 1-2 amino acid differences for >6 amino acid long CDR3s; this applies to a concatenation of CDR3K+CDR3H for scFv clones or CDR3H only for CHO clones).

[0528] For the clonal cluster analysis, USEARCH (Edgar, 2010) to compute the total amino acid differences between each pairwise alignment of full-length heavy chain sequences with abundance ≥0.01% in each CHO cell bank. Then the R package graph (version 1.2.4.1) was used to generate clustering plots for the pairwise alignments. The sequences were represented as “nodes”, with the color (and sometimes shape) defined in the respective figures. The size of the nodes reflects the frequency of the clone (small, <0.1%; medium, 0.1-1%; large, >1%). “Edges” are the links between nodes, which indicate pairwise alignments with ≤5 amino acid differences. The layout_with_graphopt (niter=3000, charge=0.03) option was used to format the output. To visualize the sequences within a library, the top five clusters containing the highest number of connected nodes/sequences were selected. These sequences were aligned and visualized as sequence logos using the R package msa 1.16.0.

[0529] To assess antibody repertoire overlap between libraries, Jaccard and Morisita indices were computed using the R package tcR (version 2.3.2). Shannon entropy and Simpson diversity indices were calculated using the R package vegan 2.5.5. Heavy chain V and J gene identities were measured using the USEARCH⁴⁹-local algorithm with the germline database as reference. For the heatmaps showing the pairing of VH and VL genes, the germline divergence histograms, and the histograms showing the distribution of heavy chain CDR3 length, each unique clone was plotted once (i.e., not scaled by sequencing read abundance).

[0530] To estimate the error rate due to RNA/cDNA amplification, a region of the heavy chain constant domain from the rCIG libraries (the region used to determine the heavy chain subtype) was sequenced, after performing the same amplification process as the final polyclonal libraries. The total error rate for this region was 0.3%, then using Illumina's quality (Q) score for each sequenced base, the estimated sequencing error rate for this region was determined to be 0.052%. Thus, the estimated maximum error rate from our amplification process is 0.3%−0.052%=0.248% (which may still contain some error due to natural sequence variation in the constant domain).

[0531] Sequencing data are available in the Short Read Archive (SRA) under project identifier PRJNA649279.

[0532] In Vitro Efficacy Studies

[0533] rCIG: Anti-SARS CoV-2 antibody reactivities were measured using a protocol based on published ELISA methods (Amanat et al., 2020). In brief, SARS CoV-2 Spike and RBD (wild type and variant proteins; Sino Biological, Wayne, Pa., USA) were used to coat ELISA plates at 2 μg/mL. Serial dilutions of antibody preparations including test plasma and recombinant products, positive control monoclonal antibodies (CR3022; Absolute Antibody, San Diego, Calif., USA, and SAD-535; Acro Biosystems, Newark, Del., USA) and negative control IVIG (Gamunex; Grifols, S.A., Sant Cugat, Spain) were performed in dilution buffer (1× PBS+0.05% Tween+0.3% dry milk) in singlet. Quantitative measurements were performed on a plate reader (Molecular Devices, Fremont, Calif., USA) and analyzed using Softmax Pro (Version 7.1; Molecular Devices, Fremont, Calif., USA) to calculate the EC50 concentrations of samples. The concentration of total IgG was calculated by Cedex Bioanalyzer Human IgG assay (Roche, Mannheim, Germany).

[0534] Blocking of binding between Spike RBD and ACE2 was demonstrated by ELISA (BPS Bioscience, San Diego, Calif., USA). In brief, SARS CoV-2 Spike RBD protein was coated onto an ELISA plate, serial dilutions of test plasma and recombinant products, positive control monoclonal antibodies (CR3022; Absolute Antibody, San Diego, Calif., USA, and SAD-535; Acro Biosystems, Newark, Del., USA) and negative control IVIG (Gamunex; Grifols, S.A., Sant Cugat, Spain) were performed in singlet in dilution buffer (1× PBS+0.05% Tween+0.3% dry milk). After incubation, ACE2-His was added at 2.5 ng/mL. After further incubation, anti-His-horseradish peroxidase was added. The plate was developed for a chemiluminescent readout. Quantitative measurements were performed on a plate reader (Molecular Devices, Fremont, Calif., USA) and analyzed using Softmax Pro (Version 7.1; Molecular Devices, Fremont, Calif., USA) to calculate the EC50 concentrations of samples.

[0535] The SARS CoV-2 pseudotype virus neutralization assay was performed in a 96-well plate using ACE2 expressing HEK-293T target cells (CRL-11268; ATCC, Manassas, Va., USA) transiently transfected with TMPRSS-2 expression plasmid. The GFP reporter pseudotype virus expressing SARS-CoV-2 spike (Integral Molecular, Philadelphia, Pa., USA) was mixed with test plasma, test rCIG, positive control monoclonal antibodies (CR3022; Absolute Antibody, San Diego, Calif., USA, and SAD- S35; Acro Biosystems, Newark, Del., USA) and negative control IVIG (Gamunex; Grifols, S.A., Sant Cugat, Spain) at a five-fold dilution series in singlet. After one-hour incubation, 4×10⁴ cells target cells were added to each well and incubated at 37° C. for 48 hours. After incubation, the media was removed from all wells without disturbing the adherent cells. TrypLE (Thermo Fisher Scientific, Waltham, Mass., USA) was added to each well and incubated for 3 minutes at 37° C. Media was added to stop trypsinization and cells were stained with DAPI and passed through a 30-40 μm filter (Pall Corporation, Port Washington, N.Y., USA) before quantifying GFP+ cells using a Cytoflex LX (Beckman Coulter, Indianapolis, Ind., USA). Flow cytometry data were analyzed by FlowJo (BD Biosciences, San Jose, Calif., USA).

[0536] SARS CoV-2 microneutralization assays were performed at the Regional Biocontainment Laboratory at Duke University Medical Center (Durham, N.C., USA) in a 96-well plate format using Vero E6 cells (CRL-1586; ATCC, Manassas, Va., USA) infected with 100 TCID50 dose of the 2019-nCoV/USA-WA1/2020 strain. Test and control samples were initially diluted to 1:50, then a 12-step, two-fold serial dilution of test antibodies was performed before infection of the cells; every test or control was run in duplicate. IVIG (Gamunex; Grifols, S.A., Sant Cugat, Spain) was used as negative control. Cell-only control wells were included alongside virus-only treated wells. Following 4 days of infection, culture media was removed, and cell monolayer was fixed with 10% neutral buffered formalin (NBF) and stained with 0.1% Crystal Violet. Absorbance at 590 nm or visual inspection was used to measure the monolayer condition/level of infection. Neutralization was reported as the lowest concentration of sample that prevents cytopathic effect in the monolayer of cells.

[0537] rZIG: Zika- and Dengue-specific antibodies were measured by ELISA. A 96-well microtiter plate was coated with either 2 μg/ml Zika or Dengue Serotype 1, 2, 3, or 4 recombinant envelope proteins (ProSpec Bio, East Brunswick, N.J., USA) in 1× carbonate coating buffer (BioLegend, San Diego, Calif., USA) and incubated overnight at 4° C. After blocking the coated plate with ultrablock buffer (Bio-Rad, Hercules, Calif., USA) and washing with PBS+0.05% Tween-20 (Teknova, Hollister, Calif., USA), eight-step three-fold serial dilutions in assay buffer (1× PBS+0.05% Tween+0.3% dry milk) were performed on rZIG-IgG1, rZIG-LALA, Zika/Dengue+ serum positive control (Seracare, Milford, Mass., USA), and a negative control IVIG (Gamunex; Grifols, S.A., Sant Cugat, Spain). Dilutions were added in duplicate and incubated at 37° C. for 1 hour. Next, 1:2500 secondary rabbit anti-human IgG horseradish peroxidase conjugate (Southern Biotech 6140-05, Birmingham, Ala., USA) was added, and the plate was washed and developed using 3,3′,5,5′-tetramethylbenzidine (TMB) substrate solution (Thermo Fisher Scientific, Waltham, Mass., USA). The reaction was halted after 8 minutes using sulfuric acid stopping solution (Southern Biotech, Birmingham, Ala., USA). Quantitative absorbance measurements were performed on a SpectraMax i3x plate reader (Molecular Devices, Fremont, Calif., USA) at 450 nm and 620 nm. Standard curves (OD450-620) were artificially set to max out at 2.97 absorbance value. EC50 values were calculated by non-linear regression analysis using GraphPad Prism v8 (San Diego, Calif., USA).

[0538] Zika and Dengue in vitro pseudotype neutralization assays were performed at Vitalant Research Institute (VRI, San Francisco, Calif., USA). rZIG, a Zika/Dengue-specific immune sera (UWIS; de-identified sample screened positive for Zika and Dengue 1-4 by University of the West Indies), monoclonal antibody positive control (UWI-mAb1; IgG1 isotype cloned from de-identified donor by University of the West Indies, found to be cross-reactive to Zika and Dengue 1-4), and IVIG negative control (Gamunex; Grifols, S.A., Sant Cugat, Spain) were co-incubated with reporter virus particles (RVPs; Integral Molecular, Philadelphia, Pa., USA) expressing both luciferase and flavivirus-specific glycoproteins as previously described. Briefly, BHK/DC-SIGN cells (CRL-325; ATCC, Manassas, Va., USA) were seeded in black 96-well plates and then incubated with a 7-step, 3-fold serial dilution of antibodies pre-incubated for one hour at 37° C. with RVPs and tested in duplicate. After 72 hours cells were lysed and luciferase activity measured using lysis buffer and firefly luciferase substrate following manufacturer's guidelines (Promega, Madison, Wis., USA). Infection-induced relative light units (RLU) in the presence of test articles were calculated as the RLU of the test article divided by the RLU of a no-serum control infection. The amount of protein required to inhibit 50% of the maximum untreated Zika or Dengue RLUs (IC50) was calculated by non-linear regression analysis using GraphPad Prism v8 (San Diego, Calif., USA).

[0539] Zika pseudotype assays for in vitro antibody-dependent enhancement (ADE) were performed at VRI. rZIG, the Zika/Dengue-specific immune sera UWIS, the monoclonal antibody positive control UWI-mAb1, and IVIG negative control (Gamunex; Grifols, S.A., Sant Cugat, Spain) were serially diluted and co-incubated with Zika pseudotype RVPs at 37° C. for 1 hour before addition to K562 chronic myelogenous leukemia cells (CCL-243; Manassas, Va., USA) in U-bottom 96-well plates in triplicate. After a 72 hour incubation at 37° C., cells were harvested, lysed, and infection-induced relative light units (RLU) in the presence of test articles were calculated as the RLU of the test article divided by the RLU of a no antibody control infection (to determine the reported fold-increase in infection).

[0540] rHIG: The Human Anti-Hib-PRP IgG ELISA kit (#980-100-PHG, Alpha Diagnostics, San Antonio, Tex., USA) was used for anti-Hib ELISA titers. Serial dilutions of test articles were performed in Low NSB (non-specific binding) sample diluent in singlet. IVIG (Gamunex; Grifols, S.A., Sant Cugat, Spain) was used as a reference control. Quantitative measurements were performed on a plate reader (Molecular Devices, Fremont, Calif., USA) at 450 nm. EC50 values were calculated using SoftMax Pro v8 (Molecular Devices, Fremont, Calif., USA).

[0541] In vitro serum bactericidal assay neutralization studies for Hib were performed at ImQuest (Frederick, Md., USA). The Haemophilus influenzae strain ATCC 10211 was obtained from ATCC (Manassas, Va., USA) as a lyophilized stock and was propagated as recommended by the supplier. The Eagan strain was obtained from Zeptometrix (Buffalo, N.Y., USA). Colonies from an overnight incubation on chocolate agar plates were inoculated into growth media (Brain Heart Infusion, or BHI broth; BD Biosciences, San Jose, Calif., USA, with 2% Fildes enrichment; Remel, San Diego, Calif., USA) and allowed to achieve an optical density of 625 nm (OD₆₂₅) of approximately 0.4. The culture was adjusted to an OD₆₂₅ of 0.15, which is equivalent to approximately 5×10⁸ colony forming units (CFU)/mL. The culture was further diluted to 5×10⁴ CFU/mL in dilution buffer (Hanks Balanced Salt Solution; Gibco, Waltham, Mass., USA, with 2% Fildes enrichment; Remel, San Diego, Calif., USA). The density of the bacterial culture used in the assay was confirmed by plating 50 μL of the 5×10³ and 5×10² dilutions in duplicate on chocolate agar and enumerating the colonies following incubation at 37° C./5% CO2 for 24 hours. rHIG and IVIG (Gamunex; Grifols, S.A., Sant Cugat, Spain) reference control were diluted three-fold in buffer, starting at 200 μg/mL such that a total of ten total dilutions were evaluated in singlet. 10 μL of each dilution of test article was added in duplicate to a 96-well microtiter plate. ATCC 10211 bacteria at a concentration of approximately 5×10⁴ CFU/mL were then added to the plate in a volume of 20 μL, such that the total in-well bacterial density would be 1×10⁴ CFU/20 μL. Following an incubation of 15 minutes at 37° C./5% CO2, 25 μL of baby rabbit complement (Pel-Freez; Rogers, Ark., USA) and 25 μL of dilution buffer was added to each well. The plate was incubated at 37° C./5% CO2 for 60 minutes. Following the incubation, 5 μL of each reaction mixture was diluted in 45 μL of dilution buffer and the entire 50 μL was plated on chocolate agar plates. The plates were incubated for approximately 16 hours at 37° C./5% CO2. Following incubation, bacterial colonies were enumerated. The fold-dilution of the test article that killed >50% of the bacteria is the serum bactericidal index (SBI).

[0542] rPIG: The Human Anti-S. Pneumococcal vaccine (Pneumovax/CPS23) IgG ELISA kit (Alpha Diagnostics #560-190-23G, San Antonio, Tex., USA) was used in parallel with the human anti-S. pneumoniae CWPS/22F IgG ELISA kit (#560-410-C22, Alpha Diagnostics, San Antonio, Tex., USA) for initial assessment of anti-pneumococcal titers against a pool of all 23 polysaccharides included in the vaccine.

[0543] Serotype-specific antibodies were measured by ELISA and opsonophagocytosis. The concentrations of serotype-specific IgG antibody were calculated using the standard reference serum, lot 007SP (National Institute for Biological Standards and Control; Hertfordshire, UK), using the standardized pneumococcal reference ELISA as previously described. Briefly, 96-well flat-bottomed microtiter plates were coated with capsular polysaccharide antigens (LGC Standards, Teddington, UK) from pneumococcal serotypes 1, 3, 4, 5, 6A, 6B, 7F, 9V, 12F, 14, 18C, 19A, 19F, 22F, 23F, and 33F. All samples were tested in duplicate and double absorbed with CWPS and with purified serotype 22F polysaccharide to neutralize the anti-cell wall polysaccharide and nonspecific homologous antibodies to serotype 22F, except for the 22F assay which was absorbed with CWPS Multi, as described in the WHO reference ELISA protocol. Plates were washed, and a titration of rPIG and reference control IVIG (Gamunex; Grifols, S.A., Sant Cugat, Spain) was performed. Plates were incubated and washed again, and prediluted alkaline phosphatase-conjugated goat anti-human IgG (Thermo Fisher Scientific, Waltham, Mass., USA) was added to each well. After another incubation, the plates were washed a final time and p-nitrophenyl phosphate substrate (MilliporeSigma, St. Louis, Mo., USA) was added. Following a final incubation, the reaction was stopped by adding 3 M NaOH (Thermo Fisher Scientific, Waltham, Mass., USA) to each well. Plates were read using a microtiter plate reader (SPECTROstar Omega; BMG Labtech, Buckinghamshire, UK) at 405 and 620 nm.

[0544] The opsonophagocytic indices (OI) to the same pneumococcal serotypes were evaluated by multiplexed opsonophagocytic assay, as previously described. In brief, frozen aliquots of target pneumococci were thawed, washed twice with opsonization buffer B (HBSS with Ca and Mg, 0.1% gelatin, and 10% fetal bovine serum), and diluted to the proper bacterial density (approximately 2×10⁵ CFUs/mL each serotype). Equal volumes of four bacterial suspensions chosen for simultaneous analysis were pooled. Duplicate serially diluted test articles (20 μL/well) were mixed with 10 μL of bacterial suspension in each well of a microplate. After 30 minutes of incubation at room temperature with shaking at 700 rpm, 10 μL of 3- to 4-week-old rabbit complement (Pel-Freeze, Rogers, Ark., USA) and 40 μL of differentiated HL60 cells (10⁷ cells; CCL-240, ATCC, Manassas, Va., USA) were added. Plates were incubated in a 37° C./5% CO2 incubator with shaking at 700 rpm. After being incubated for 45 minutes, plates were placed on ice for 20 minutes, and an aliquot of the final reaction mixture (10 μL) was spotted onto four different Todd-Hewitt broth with 0.5% yeast extract and 0.75% agar (THY) plate. When the fluid was absorbed into the agar, an equal volume of overlay agar containing one of four antibiotics (optochin, spectinomycin, streptomycin, or trimethoprim) was applied to each THY agar plate. After overnight incubation at 37° C., the number of bacterial colonies in the agar plates was enumerated. IVIG was used as reference control (Gamunex; Grifols, S.A., Sant Cugat, Spain). The OI was defined as the test product dilution that kills 50% of bacteria and was determined by linear interpolation.

[0545] rhATG: To assess relative amount and specificity of rhATG, an ELISA was performed on antigens known to be expressed on thymocytes and previously described as having rabbit-ATG reactivity.⁴¹ Rabbit-ATG positive control was from Sanofi Genzyme (Thymogobulin; Cambridge, Mass., USA). T cell antigens (CD3, CD4, CDS, CD7, CD8, CD16a, CD32a, CD45, CD81, CD85 CD95) were purchased from Sino Biological (Wayne, Pa., USA) and individually coated onto 96-well ELISA plates (Thermo Fisher Scientific, Waltham, Mass., USA) at 1 μg/mL in lx carbonate coating buffer (BioLegend, San Diego, Calif., USA). After an overnight incubation at 4° C., coated plates were washed and blocked (Bio-Rad, Hercules, Calif., USA) for 1 hour. Polyclonal products were diluted to 200 μg/mL of total IgG and an 8-step 1:3 titration in assay buffer (1× PBS+0.05% Tween+0.3% dry milk) was performed. The antibody titrations were added to each antigen and incubated for 1 hour at 37° C. 1:2500 polyclonal HRP goat anti-rabbit IgG (E28002; Novodiax, Hayward, Calif., USA) or 1:2500 mouse anti-human IgG HRP (109- 035-088; Jackson ImmunoResearch, West Grove, Pa., USA) were diluted 1:2500 and incubated on the plate for 1 hour. Plates were washed, developed using 1-step ultra TMB substrate (Thermo Fisher Scientific, Waltham, Mass., USA), and stopped with 1 N HCl. Plates were read by a spectrophotometer (Molecular Devices, Fremont, Calif., USA) at 450 nm and analyzed with Softmax Pro (v7; Molecular Devices, Fremont, Calif., USA).

[0546] To assess off-target antibody binding a red blood cell antigen binding assay was perfromed, using the Capture-R kit (Immucor, Norcross, Ga., USA). Using a dilution of test article (Thymoglobulin or rhATG) or positive control from the Immucor kit, samples were added to the plate and incubated for lhr at 37° C. in singlets. ELISA plates were washed and incubated with 1:2500 polyclonal HRP goat anti-rabbit IgG (E28002; Novodiax, Hayward, Calif., USA) or 1:2500 mouse anti-human IgG HRP (109-035-088; Jackson ImmunoResearch, West Grove, Pa., USA). Subsequently, plates were washed and developed with ultra-TMB substrate (Thermo Fisher Scientific, Waltham, Mass.) and the reaction was stopped with 3 M NaOH (Thermo Fisher Scientific, Waltham, Mass., USA) and read the plate on a spectrophotometer at 450 nm.

[0547] To determine in vitro function of rhATG, peripheral blood mononuclear cells were isolated from whole blood acquired from a CRO (StemCell Technologies, Vancouver, Canada) and frozen. PBMCs were thawed, washed, and plated at 1.5×10⁵ cells/well in singlets. Thymoglobulin or rhATG were diluted five-fold starting at 40 μg/mL total IgG and co-incubated with each donor PBMC. Cells were co-incubated overnight at 37° C. After incubation, cells were washed, FcR blocked, and stained for CD45 (clone H130; BioLegend #304008, San Diego, Calif., USA), CD3 (clone UCHT1; BioLegend #300439, San Diego, Calif., USA), CD8 (clone BW135/80; Miltenyi #130-113-157, Bergisch Gladbach, Germany), CD20 (clone 2H7; BioLegend, San Diego, Calif.), CD56 (clone 5.1H11; BioLegend #362509, San Diego, Calif., USA), and CD16 (clone 3G8; BioLegend #302017, San Diego, Calif., USA). 1 μL of each antibody was used per 1.5×10⁵ cells. Flow cytometry was performed using a Cytoflex LX (Beckman Coulter, Indianapolis, Ind., USA) with CytExpert (2.3.1.22) and a consistent collection volume of 150 seconds per well was implemented for every sample. The data were analyzed by FlowJo v10 (BD Biosciences, San Jose, Calif., USA). Cell counts after antibody co-incubation relative to no-antibody control (% cells) were calculated. Results were graphed in GraphPad Prism v8 (San Diego, Calif., USA). The gating strategy is outlined in FIG. 50A.

[0548] In Vivo Mouse Efficacy Studies

[0549] Ethical approval was obtained by Institutional Animal Care and Use Committees (IACUCs) at either SSI (Copenhagen, Denmark) for the Hib challenge model or Jackson Laboratory (Sacramento, Calif., USA) for the GVH model.

[0550] IVIG+rHIG/rPIG: For IVIG+rHIG/rPIG in vivo challenge studies, the Haemophilus influenza strain ATCC 10211 was grown on chocolate agar plates overnight at 35° C. and 5% CO2. Single overnight colonies were resuspended in sterile saline to 1.5×10⁸ CFU/mL. This suspension was diluted in BHI broth to 1.5×10⁷ CFU/mL and further diluted in BHI broth with 5% mucin and 2% hemoglobin to 1.5×10⁴ CFU/mL. In an IACUC-approved protocol (SSI, Copenhagen, Denmark), Balb/cJ mice (Taconic, Rensselaer, N.Y., USA; n=6 per group) were inoculated with single 0.5 mL intraperitoneal doses of 10⁵ CFU/mL ATCC 10211, and then randomized into treatment groups by animal identifier. All mice were female, age 6-8 weeks. The temperature and humidity were registered daily in the animal facilities. The temperature was 22° C.+/−2° C. and can be regulated by heating and cooling. The humidity was 55+/−10%. The air changes per hour were approximately 8-12 times (70-73 times per hours inside cages), and light/dark period was in 12-hours interval of 6 am-6 pm/6 pm-6 am. The mice had free access to domestic quality drinking water and food (Teklad Global diet 2916C, Envigo, Indianapolis, Ind., USA) and occasionally peanuts and sunflower seeds (Koge Korn A/S, Koge, Denmark). The mice were housed in IVC cages , 6-8 mice per cage, with bedding from Tapvei. Further, the animals were offered Enviro-Dri nesting material and cardboard houses (Bio-Serv, Flemington, N.J., USA).

[0551] Approximately 1 hour before inoculation, mice were treated orally with 45 μL Nurofen (30 mg/kg) as pain relief. Twenty-four hours prior to Hib inoculation, mice were intravenously administered 200 mg/kg IVIG+rHIG/rPIG mixture, 500 mg/kg IVIG+rHIG/rPIG mixture, 500 mg/kg IVIG (Gamunex; Grifols, S.A., Sant Cugat, Spain), or saline (no treatment). For the ciprofloxacin positive control, one hour after Hib inoculation, mice were dosed with 20 mg/kg ciprofloxacin. Mice were scored for clinical signs of infection, then after 6 hours all animals were sacrificed and blood and peritoneal fluid was collected for CFU determination by serial dilution and plating of 0.02 ml spots on chocolate agar plates.

[0552] rhATG was tested for ability to delay GVHD in immunodeficient NOD scid gamma (NSG) mice (genotype: NOD.Cg-Prkdc^{scid} Il2rg^{tm1Wj1}/SzJ), compared against rabbit-ATG (Thymoglobulin; Sanofi Genzyme, Cambridge, Mass.) and a vehicle control. All mice were female, age 6-8 weeks. The mice were ear notched for identification and housed in individually ventilated polysulfonate cages with HEPA filtered air at a density of up to 5 mice per cage. The animal room was lighted entirely with artificial fluorescent lighting, with a controlled 12 hour light/dark cycle (6 am to 6 pm light). The normal temperature and relative humidity ranges in the animal rooms were 22-26° C. and 30-70%, respectively. The animal rooms were set to have up to 15 air exchanges per hour. Filtered tap water, acidified to a pH of 2.5 to 3.0, and standard rodent chow was provided ad libitum.

[0553] Each animal was grafted with approximately 1×10⁷ PBMC of a single human donor. On Day 5 after PBMC engraftment, animals were randomized by weight and dosed intravenously every other day for two weeks with 5.5 mg/kg rhATG (n=8), 6.5 mg/kg Thymoglobulin (n=8), or a vehicle control (n=8), or Days 5, 6, and 7 post- engraftment with 5.5 mg/kg rhATG (n=8), 6.5 mg/kg Thymoglobulin (n=8), or a vehicle control (n=8). Two PBMC donors were tested for each dosing regimen (2 PBMC donors×2 dosing regimens×3 treatment groups×8 animals per group=96 animals). Animals were assessed for clinical signs of mortality daily. Mice were euthanized by CO2 asphyxiation before final study take down if they showed >20% weight loss from their starting weight or a combination of the following clinical signs: >10-20% weight loss from their starting weight, cold to touch, lethargic, pale, hunched posture and scruffy coat. 50 μL of blood was drawn from all alive animals on Days 9,16, 23, and 30 post-engraftment via retro-orbital bleed, and flow cytometry stained for Human (hu)CD45-PE (clone HI30; BioLegend #304008, San Diego, Calif., USA) and 7AAD (BioLegend, San Diego, Calif., USA); 50 μL of CountBright beads (Thermo Fisher Scientific, Waltham, Mass., USA) were added to each sample prior to acquisition. Flow cytometric data acquisition was performed using the BD Biosciences FACSCanto flow cytometer (San Jose, Calif., USA), and data were acquired and analyzed using BD Biosciences FACSDiva™ software (version 8; San Jose, Calif., USA); lymphocytes, singlet, live cells, and CD45+ cells were gated and cell numbers quantified relative to CountBright beads. The gating strategy is outlined in FIG. 50B.

### 9. INCORPORATION BY REFERENCE

[0554] All publications, patents, patent applications and other documents cited in this application are hereby incorporated by reference in their entireties for all purposes to the same extent as if each individual publication, patent, patent application or other document were individually indicated to be incorporated by reference for all purposes.

### 10. EQUIVALENTS

[0555] Whereas various specific embodiments have been illustrated and described, the above specification is not restrictive. It will be appreciated that various changes can be made without departing from the spirit and scope of the invention(s). Many variations will become apparent to those skilled in the art upon review of this specification.

TABLE 6
Characteristics of the 50 donors screened to create rCIG libraries.

| | | | | | | Days | | | | | | |
|---|---|---|---|---|---|---|---|---|---|---|---|---|
| | | | | | | between | | CoV-2 | CoV-2 | CoV-2 | CoV-2 | |
| | | | | | | symptoms | | S1 | S1 | RBD | RBD | |
| | | | | | Date of | onset and | | binding | peak | binding | peak | |
| GigaGen | | | | | symptoms | blood | Presumed/ | EC50 | OD | EC50 | OD | Library |
| donor ID | Race | Sex | Age | Symptoms | onset | draw | Confirmed | (mg/ml) | signal | (mg/ml) | signal | ID |
| CSS-1902 | AA | Male | 67 | Fever, SOB | Feb. 28, 2020 | 32 | Confirmed | 0.0056 | 3.15 | 0.039 | 2.46 | Library |
| | | | | | | | | | | | | 1 |
| CSS-1905 | White | Male | 71 | Fever, Cough, | Mar. 16, 2020 | 15 | Presumed | 0.019 | 3.22 | 0.12 | 2.34 | Library |
| | | | | SOB | | | | | | | | 1 |
| CSS-1907 | AA | Female | 66 | Fever, Cough | Mar. 14, 2020 | 17 | Presumed | 0.063 | 2.98 | 0.091 | 1.41 | Library |
| | | | | | | | | | | | | 2 |
| CSS-1911 | White | Female | 61 | Fever, ST, SOB | Mar. 9, 2020 | 22 | Presumed | 0.10 | 2.80 | 0.13 | 0.75 | Library |
| | | | | | | | | | | | | 2 |
| CSS-1921 | White | Female | 30 | Fever. ST, | Mar. 17, 2020 | 15 | Confirmed | 0.021 | 2.95 | 0.11 | 1.81 | Library |
| | | | | Cough, SOB | | | | | | | | 3 |
| CSS-1920 | White | Female | 57 | Fever, Cough, | Mar. 16, 2020 | 16 | Confirmed | 0.022 | 2.81 | 0.066 | 1.52 | Library |
| | | | | SOB | | | | | | | | 3 |
| CSS-1928 | White | Female | 63 | Fever, Cough | Mar. 14, 2020 | 19 | Presumed | 0.025 | 2.95 | 0.076 | 1.96 | Library |
| | | | | | | | | | | | | 4 |
| CSS-1924 | White | Female | 31 | Fever, Cough, | Mar. 21, 2020 | 12 | Confirmed | 0.16 | 2.63 | 0.23 | 2.30 | Library |
| | | | | SOB | | | | | | | | 4 |
| CSS-1944 | White | Female | 49 | Fever, ST, | Mar. 15, 2020 | 24 | Confirmed | 0.014 | 3.21 | 0.053 | 2.17 | Library |
| | | | | Cough, | | | | | | | | 5 |
| | | | | Pneumonia | | | | | | | | |
| CSS-1943 | White | Female | 52 | ST, Cough, | Mar. 16, 2020 | 23 | Confirmed | 0.014 | 3.15 | 0.067 | 1.85 | Library |
| | | | | SOB | | | | | | | | 5 |
| CSS-1937 | White | Female | 35 | Fever, ST, | Mar. 17, 2020 | 21 | Confirmed | 0.009 | 3.17 | 0.027 | 1.71 | Library |
| | | | | Cough, SOB | | | | | | | | 6 |
| CSS-1936 | White | Female | 23 | Fever, Cough, | Mar. 7, 2020 | 31 | Confirmed | 0.011 | 3.16 | 0.088 | 2.01 | Library |
| | | | | SOB | | | | | | | | 6 |
| CSS-1901 | White | Male | 67 | Fever, Cough | Mar. 15, 2020 | 16 | Confirmed | 0.010 | 3.09 | 0.085 | 2.37 | Library |
| | | | | | | | | | | | | 7 |
| CSS-1940 | White | Female | 40 | Fever, Cough | Mar. 18, 2020 | 21 | Confirmed | 0.012 | 3.07 | 0.057 | 1.99 | Library |
| | | | | | | | | | | | | 7 |
| CSS-1939 | White | Female | 24 | Fever, ST, | Mar. 8, 2020 | 30 | Confirmed | 0.037 | 3.10 | 0.073 | 1.37 | Library |
| | | | | Cough, SOB | | | | | | | | 8 |
| CSS-1949 | White | Male | 47 | Fever, Cough | Mar. 21, 2020 | 19 | Confirmed | 0.13 | 2.79 | 0.32 | 2.32 | Library |
| | | | | | | | | | | | | 8 |
| CSS-1945 | White | Female | 31 | Fever, ST, | Mar. 20, 2020 | 19 | Confirmed | 0.051 | 3.09 | 0.15 | 1.03 | |
| | | | | Cough, SOB | | | | | | | | |
| CSS-1931 | White | Female | 35 | Fever, ST, | Mar. 24, 2020 | 13 | Confirmed | 0.11 | 2.45 | 0.27 | 1.22 | |
| | | | | Cough, SOB | | | | | | | | |
| CSS-1933 | White | Female | 43 | Fever, Cough | Feb. 25, 2020 | 42 | Confirmed | 0.13 | 3.23 | 0.27 | 1.16 | |
| CSS-1932 | White | Female | 33 | Fever, SOB | Mar. 18, 2020 | 20 | Confirmed | 0.13 | 3.09 | 0.11 | 1.05 | |
| CSS-1935 | White | Female | 45 | ST, Cough, | Mar. 22, 2020 | 16 | Confirmed | 0.16 | 3.07 | 0.14 | 1.22 | |
| | | | | SOB | | | | | | | | |
| CSS-1948 | White | Female | 45 | Fever, Cough, | Mar. 25, 2020 | 15 | Confirmed | 0.17 | 2.64 | 0.091 | 0.97 | |
| | | | | SOB | | | | | | | | |
| CSS-1938 | White | Female | 37 | Fever, ST, | Mar. 22, 2020 | 16 | Confirmed | 0.20 | 3.20 | 0.25 | 0.82 | |
| | | | | Cough, SOB | | | | | | | | |
| CSS-1929 | AA | Male | 49 | Fever, Cough, | Feb. 28, 2020 | 34 | Presumed | 0.23 | 0.92 | 0.041 | 1.31 | |
| | | | | SOB | | | | | | | | |
| CSS-1922 | White | Male | 54 | Fever, Cough, | Feb. 28, 2020 | 34 | Presumed | 0.24 | 0.34 | 0.14 | 0.45 | |
| | | | | SOB | | | | | | | | |
| CSS-1914 | White | Female | 65 | Fever, Cough, | Feb. 26, 2020 | 35 | Presumed | 0.37 | 1.54 | 0.39 | 2.76 | |
| | | | | SOB | | | | | | | | |
| CSS-1925 | White | Male | 63 | Fever, Cough, | Mar. 10, 2020 | 23 | Presumed | 0.65 | 0.68 | 0.17 | 0.75 | |
| | | | | SOB, ST | | | | | | | | |
| CSS-1946 | White | Female | 50 | ST, Cough | Mar. 19, 2020 | 21 | Confirmed | 0.67 | 2.50 | 0.69 | 1.66 | |
| CSS-1930 | White | Female | 47 | Fever, Cough | Mar. 10, 2020 | 23 | Presumed | 0.69 | 0.45 | 1.29 | 0.94 | |
| CSS-1934 | White | Female | 42 | Fever, ST, | Mar. 21, 2020 | 17 | Confirmed | 0.75 | 3.17 | 0.74 | 1.11 | |
| | | | | Cough | | | | | | | | |
| CSS-1926 | White | Female | 59 | Fever, Cough, | Mar. 8, 2020 | 25 | Presumed | 0.77 | 0.55 | 0.70 | 0.80 | |
| | | | | SOB, ST | | | | | | | | |
| CSS-1915 | White | Male | 59 | Fever, ST, SOB | Mar. 11, 2020 | 21 | Presumed | 0.83 | 0.81 | 0.61 | 0.85 | |
| CSS-1941 | White | Female | 69 | ST, Cough | Mar. 11, 2020 | 28 | Confirmed | 0.91 | 2.93 | 0.55 | 0.94 | |
| CSS-1917 | White | Male | 67 | Fever, Cough | Mar. 10, 2020 | 22 | Presumed | 0.91 | 0.64 | 0.69 | 0.77 | |
| CSS-1904 | White | Female | 20 | Fever, ST, | Mar. 11, 2020 | 20 | Confirmed | 0.96 | 0.64 | 0.63 | 0.86 | |
| | | | | Cough | | | | | | | | |
| CSS-1916 | White | Male | 70 | Fever, SOB | Feb. 27, 2020 | 34 | Presumed | 1.00 | 0.69 | 0.15 | 1.00 | |
| CSS-1947 | AA | Female | 52 | Fever, Cough | Mar. 21, 2020 | 19 | Confirmed | 1.25 | 2.68 | 0.81 | 0.99 | |
| CSS-1918 | White | Female | 59 | Fever, Cough, | Mar. 2, 2020 | 30 | Presumed | 1.32 | 1.55 | 0.38 | 0.91 | |
| | | | | SOB | | | | | | | | |
| CSS-1923 | White | Female | 57 | Fever, Cough | Feb. 25, 2020 | 37 | Presumed | 1.33 | 0.62 | 0.92 | 1.35 | |
| CSS-1919 | White | Female | 53 | Fever, ST, SOB | Mar. 13, 2020 | 19 | Presumed | 1.34 | 0.80 | 0.30 | 0.76 | |
| CSS-1913 | White | Female | 57 | Fever, Cough | Mar. 5, 2020 | 26 | Presumed | 1.47 | 1.69 | 0.23 | 0.88 | |
| CSS-1927 | AA | Female | 55 | Cough, ST | Mar. 2, 2020 | 31 | Presumed | 1.60 | 0.92 | 0.72 | 1.18 | |
| CSS-1909 | White | Female | 70 | Fever, Cough, | Feb. 25, 2020 | 35 | Presumed | 1.88 | 0.92 | 0.13 | 0.75 | |
| | | | | SOB | | | | | | | | |
| CSS-1912 | White | Female | 46 | Fever, Cough, | Mar. 8, 2020 | 23 | Confirmed | 2.20 | 0.76 | 0.10 | 0.67 | |
| | | | | SOB | | | | | | | | |
| CSS-1906 | White | Male | 58 | Fever, ST, SOB, | Feb. 25, 2020 | 35 | Presumed | 2.59 | 1.28 | 1.46 | 1.31 | |
| | | | | Cough | | | | | | | | |
| CSS-1908 | White | Female | 57 | Fever, Cough, | Feb. 24, 2020 | 36 | Presumed | 2.60 | 0.82 | 0.46 | 0.72 | |
| | | | | SOB | | | | | | | | |
| CSS-1910 | White | Female | 25 | Fever, ST, | Mar. 4, 2020 | 27 | Presumed | 2.84 | 1.27 | 1.12 | 1.23 | |
| | | | | Cough, SOB | | | | | | | | |
| CSS-1942 | White | Female | 39 | Fever, Cough | Mar. 24, 2020 | 15 | Confirmed | 2.89 | 2.03 | 1.88 | 2.31 | |
| CSS-1903 | White | Female | 52 | Fever, Cough, | Mar. 1, 2020 | 30 | Presumed | 3.47 | 0.84 | 1.25 | 0.99 | |
| | | | | SOB, Fatigue | | | | | | | | |
| CSS-1900 | White | Female | 69 | Fever, Cough | Mar. 6, 2020 | 25 | Presumed | 9.94 | 0.73 | 3.11 | 1.00 | |
| IVIG | — | — | — | — | — | — | — | 1.41 | 1.99 | 1.27 | 2.26 | |
| (Gamunex) | | | | | | | | | | | | |

SOB = shortness of breath;
ST = sore throat.

TABLE 7
Characterization of the rCIG scFv sorted libraries. Library IDs are from TABLE S1.
Each library plasma is a 1:1 mixture of plasma from the two donors who were used to
generate each respective rCIG library. The % binders
is determined by yeast scFv flow cytometry. The
number of post-sort antibodies was determined by
antibody RNA-seq using IIlumina sequencing after the 2nd yeast sort.

| | | # Ab | | | | |
|---|---|---|---|---|---|---|
| | | clones | # Ab clones | # Ab clones | # Ab clones | |
| | | (pre-sort; | (post-sort; | (pre-sort; | (post-sort; | Shannon |
| Library/ | # input | unique | unique | combined | combined | entropy |
| Sample | cells | CDR3) | CDR3) | CDR3) | CDR3) | (pre-sort) |
| Sorted | 3,400,000 | 87,902 | 3,971 | 41,306 | 1,472 | 5.6 |
| Library 1 | | | | | | |
| Library 1 | — | — | — | — | — | — |
| plasma | | | | | | |
| Sorted | 3,580,000 | 54,986 | 1,730 | 28,058 | 616 | 5.1 |
| Library 2 | | | | | | |
| Library 2 | — | — | — | — | — | — |
| plasma | | | | | | |
| Sorted | 3,490,000 | 67,805 | 3,042 | 31,374 | 1,013 | 6.2 |
| Library 3 | | | | | | |
| Library 3 | — | — | — | — | — | — |
| plasma | | | | | | |
| Sorted | 3,230,000 | 74,074 | 3,069 | 37,640 | 1,144 | 6.7 |
| Library 4 | | | | | | |
| Library 4 | — | — | — | — | — | — |
| plasma | | | | | | |
| Sorted | 3,790,000 | 156,592 | 2,122 | 89,406 | 1,062 | 6.9 |
| Library 5 | | | | | | |
| Library 5 | — | — | — | — | — | — |
| plasma | | | | | | |
| Sorted | 3,900,000 | 62,368 | 1,656 | 27,198 | 665 | 5.3 |
| Library 6 | | | | | | |
| Library 6 | — | — | — | — | — | — |
| plasma | | | | | | |
| Sorted | 2,950,000 | 67,212 | 1,768 | 24,004 | 662 | 5.8 |
| Library 7 | | | | | | |
| Library 7 | — | — | — | — | — | — |
| plasma | | | | | | |
| Sorted | 3,880,000 | 116,642 | 1,214 | 53,885 | 536 | 6.1 |
| Library 8 | | | | | | |
| Library 8 | — | — | — | — | — | — |
| plasma | | | | | | |
| IVIG | — | — | — | — | — | — |
| (Gamunex) | | | | | | |
| SARS CoV | — | — | — | — | — | — |
| mAb | | | | | | |
| [CR3022] | | | | | | |
| SARS | — | — | — | — | — | — |
| CoV-2 | | | | | | |
| mAb | | | | | | |
| [SAD-S35] | | | | | | |

| | Shannon | Simpson | Simpson | | |
|---|---|---|---|---|---|
| Library/ | entropy | index | index | # sequencing | # sequencing |
| Sample | (post-sort) | (pre-sort) | (post-sort) | reads (pre-sort) | reads (post-sort) |
| Sorted | 2.6 | 0.99 | 0.86 | 674,234 | 58,556 |
| Library 1 | | | | | |
| Library 1 | — | — | — | — | — |
| plasma | | | | | |
| Sorted | 1.5 | 0.99 | 0.53 | 594,209 | 64,730 |
| Library 2 | | | | | |
| Library 2 | — | — | — | — | |
| plasma | | | | | |
| Sorted | 2.4 | 0.99 | 0.87 | 612,720 | 67,669 |
| Library 3 | | | | | |
| Library 3 | — | — | — | — | |
| plasma | | | | | |
| Sorted | 2.8 | 0.99 | 0.89 | 708,240 | 76,274 |
| Library 4 | | | | | |
| Library 4 | — | — | — | — | — |
| plasma | | | | | |
| Sorted | 2.6 | 0.99 | 0.77 | 717,789 | 34,397 |
| Library 5 | | | | | |
| Library 5 | — | — | — | — | — |
| plasma | | | | | |
| Sorted | 2.5 | 0.98 | 0.87 | 765,707 | 25,234 |
| Library 6 | | | | | |
| Library 6 | — | — | — | — | — |
| plasma | | | | | |
| Sorted | 2.0 | 0.99 | 0.78 | 846,270 | 34,556 |
| Library 7 | | | | | |
| Library 7 | — | — | — | — | — |
| plasma | | | | | |
| Sorted | 1.4 | 0.99 | 0.55 | 783,140 | 30,044 |
| Library 8 | | | | | |
| Library 8 | — | — | — | — | — |
| plasma | | | | | |
| IVIG | — | — | — | — | — |
| (Gamunex) | | | | | |
| SARS CoV | — | — | — | — | — |
| mAb | | | | | |
| [CR3022] | | | | | |
| SARS | — | — | — | — | — |
| CoV-2 | | | | | |
| mAb | | | | | |
| [SAD-S35] | | | | | |

| | % | % | | | | | | | | |
|---|---|---|---|---|---|---|---|---|---|---|
| | binders | binders | | | | | | | | |
| Library/ | (1st | (2nd | % IgG subtype (pre-sort) | | | | % IgG subtype (post-sort) | | | |
| Sample | sort) | sort) | IgG1 | IgG2 | IgG3 | IgG4 | IgG1 | IgG2 | IgG3 | IgG4 |
| Sorted | 1.02 | 43.7 | 83.4 | 8.9 | 7.4 | 0.3 | 88.9 | 8.6 | 2.6 | 0.0 |
| Library 1 | | | | | | | | | | |
| Library 1 | — | — | — | — | — | — | — | — | — | — |
| plasma | | | | | | | | | | |
| Sorted | 0.57 | 35.8 | 61.1 | 21.4 | 16.2 | 1.3 | 63.6 | 28.8 | 3.0 | 4.6 |
| Library 2 | | | | | | | | | | |
| Library 2 | — | — | — | — | — | — | — | — | — | — |
| plasma | | | | | | | | | | |
| Sorted | 1.6 | 49.3 | 68.1 | 14.1 | 17.4 | 0.4 | 83.9 | 14.4 | 1.7 | 0.0 |
| Library 3 | | | | | | | | | | |
| Library 3 | — | — | — | — | — | — | — | — | — | — |
| plasma | | | | | | | | | | |
| Sorted | 0.42 | 27.4 | 55.4 | 9.9 | 33.5 | 1.3 | 72.3 | 18.1 | 9.0 | 0.6 |
| Library 4 | | | | | | | | | | |
| Library 4 | — | — | — | — | — | — | — | — | — | — |
| plasma | | | | | | | | | | |
| Sorted | 2.29 | 47.8 | 54.7 | 22.0 | 22.8 | 0.6 | 80.8 | 14.1 | 5.1 | 0.0 |
| Library 5 | | | | | | | | | | |
| Library 5 | — | — | — | — | — | — | — | — | — | — |
| plasma | | | | | | | | | | |
| Sorted | 0.95 | 26.6 | 64.2 | 16.6 | 17.8 | 1.3 | 85.1 | 13.4 | 1.5 | 0.0 |
| Library 6 | | | | | | | | | | |
| Library 6 | — | — | — | — | — | — | — | — | — | — |
| plasma | | | | | | | | | | |
| Sorted | 1.37 | 34.7 | 74.2 | 15.5 | 10.0 | 0.3 | 92.2 | 5.2 | 2.6 | 0.0 |
| Library 7 | | | | | | | | | | |
| Library 7 | — | — | — | — | — | — | — | — | — | — |
| plasma | | | | | | | | | | |
| Sorted | 0.88 | 24.9 | 51.5 | 19.0 | 26.5 | 3.0 | 75.9 | 16.7 | 5.6 | 1.9 |
| Library 8 | | | | | | | | | | |
| Library 8 | — | — | — | — | — | — | — | — | — | — |
| plasma | | | | | | | | | | |
| IVIG | — | — | — | — | — | — | — | — | — | — |
| (Gamunex) | | | | | | | | | | |
| SARS CoV | — | — | — | — | — | — | — | — | — | — |
| mAb | | | | | | | | | | |
| [CR3022] | | | | | | | | | | |
| SARS | — | — | — | — | — | — | — | — | — | — |
| CoV-2 | | | | | | | | | | |
| mAb | | | | | | | | | | |
| [SAD-535] | | | | | | | | | | |

| | CoV-2 S1 | | CoV-2 RBD | CoV-2 RBD binding |
|---|---|---|---|---|
| Library/ | binding EC50 | CoV-2 S1 binding | binding EC50 | fold over |
| Sample | (mg/ml) | fold over plasma avg | (mg/ml) | plasma avg |
| Sorted | 0.000072 | 335 | 0.000053 | 447 |
| Library 1 | | | | |
| Library 1 | 0.013 | 1.9 | 0.013 | 1.8 |
| plasma | | | | |
| Sorted | 0.00014 | 172 | 0.0001 | 237 |
| Library 2 | | | | |
| Library 2 | 0.069 | 0.3 | 0.044 | 0.5 |
| plasma | | | | |
| Sorted | 0.000052 | 464 | 0.000047 | 504 |
| Library 3 | | | | |
| Library 3 | 0.024 | 1.0 | 0.034 | 0.7 |
| plasma | | | | |
| Sorted | 0.000054 | 447 | 0.000058 | 409 |
| Library 4 | | | | |
| Library 4 | 0.027 | 0.9 | 0.035 | 0.7 |
| plasma | | | | |
| Sorted | 0.000066 | 366 | 0.000061 | 389 |
| Library 5 | | | | |
| Library 5 | 0.017 | 1.4 | 0.021 | 1.1 |
| plasma | | | | |
| Sorted | 0.000049 | 492 | 0.000054 | 439 |
| Library 6 | | | | |
| Library 6 | 0.012 | 2.0 | 0.017 | 1.4 |
| plasma | | | | |
| Sorted | 0.000042 | 574 | 0.000044 | 539 |
| Library 7 | | | | |
| Library 7 | 0.012 | 2.0 | 0.0096 | 2.5 |
| plasma | | | | |
| Sorted | 0.000028 | 862 | 0.000027 | 878 |
| Library 8 | | | | |
| Library 8 | 0.019 | 1.3 | 0.016 | 1.5 |
| plasma | | | | |
| IVIG | 1.38 | — | 1.25 | — |
| (Gamunex) | | | | |
| SARS CoV | 0.000078 | — | 0.000088 | — |
| mAb | | | | |
| [CR3022] | | | | |
| SARS | 0.000058 | — | 0.000057 | — |
| CoV-2 | | | | |
| mAb | | | | |
| [SAD-535] | | | | |

| | | Spike:ACE2 | |
|---|---|---|---|
| | Spike:ACE2 plate-based | plate-based neutralization | CoV-2 pseudotype |
| Library/Sample | neutralization IC50 (mg/ml) | over plasma avg | neutralization IC50 (mg/ml) |
| Sorted Library 1 | 0.0026 | 288 | 0.00049 |
| Library 1 plasma | 0.7 | 1.1 | 0.015 |
| Sorted Library 2 | 0.0052 | 144 | 0.0048 |
| Library 2 plasma | 1.28 | 0.6 | 0.76 |
| Sorted Library 3 | 0.0018 | 416 | 0.0018 |
| Library 3 plasma | 0.28 | 2.7 | 0.056 |
| Sorted Library 4 | 0.0017 | 440 | 0.002 |
| Library 4 plasma | 2.4 | 0.3 | 0.031 |
| Sorted Library 5 | 0.0016 | 468 | 0.00082 |
| Library 5 plasma | 0.28 | 2.7 | 0.049 |
| Sorted Library 6 | 0.0016 | 468 | 0.00034 |
| Library 6 plasma | 0.38 | 2.0 | 0.039 |
| Sorted Library 7 | 0.023 | 33 | 0.00032 |
| Library 7 plasma | 0.32 | 2.3 | 0.024 |
| Sorted Library 8 | 0.0016 | 468 | 0.00017 |
| Library 8 plasma | 0.35 | 2.1 | 0.061 |
| IVIG (Gamunex) | None | — | None |
| SARS CoV mAb | None | — | 0.1 |
| [CR3022] | | | |
| SARS CoV-2 | 0.0011 | — | 0.00026 |
| mAb [SAD-535] | | | |

| | CoV-2 | Live CoV-2 | Live CoV-2 |
|---|---|---|---|
| | pseudotype neutralization | virus neutralization | virus neutralization |
| Library/Sample | over plasma avg | concentration (mg/ml) | over plasma avg |
| Sorted Library 1 | 264 | 0.0032 | 17 |
| Library 1 plasma | 8.6 | 0.016 | 3.3 |
| Sorted Library 2 | 27 | 0.0032 | 17 |
| Library 2 plasma | 0.2 | 0.166 | 0.3 |
| Sorted Library 3 | 72 | 0.0047 | 11 |
| Library 3 plasma | 2.3 | 0.032 | 1.7 |
| Sorted Library 4 | 65 | 0.002 | 26 |
| Library 4 plasma | 4.2 | 0.038 | 1.4 |
| Sorted Library 5 | 158 | 0.0017 | 31 |
| Library 5 plasma | 2.6 | 0.042 | 1.3 |
| Sorted Library 6 | 381 | 0.00043 | 123 |
| Library 6 plasma | 3.3 | 0.045 | 1.2 |
| Sorted Library 7 | 404 | 0.00095 | 56 |
| Library 7 plasma | 5.4 | 0.018 | 2.9 |
| Sorted Library 8 | 761 | 0.00048 | 110 |
| Library 8 plasma | 2.1 | 0.066 | 0.8 |
| IVIG (Gamunex) | — | None | — |
| SARS CoV mAb | — | Not tested | — |
| [CR3022] | | | |
| SARS CoV-2 | — | Not tested | — |
| mAb [SAD-535] | | | |

TABLE 8
The relative ratio that each of the eight sorted rCIG libraries was mixed is indicated.

| | | CoV-2 | | Live CoV-2 | | | |
|---|---|---|---|---|---|---|---|
| | CoV-2 | pseudotype | Live CoV-2 virus | virus | | | |
| | pseudotype | neutralization | neutralization | neutralization | # Ab clones | Most | Relative |
| | neutralization | over plasma | concentration | over plasma | (post-sort; | abundant | ratio |
| Sample/Library | IC50 (mg/ml) | avg | (mg/ml) | avg | unique CDR3) | clone | pooled |
| Sorted Library 1 | 0.00049 | 264.0 | 0.0032 | 17 | 3,971 | 30% | 1.5 |
| Library 1 plasma | 0.015 | 8.6 | 0.016 | 3.3 | — | — | |
| Sorted Library 2 | 0.0048 | 27.0 | 0.0032 | 17 | 1,730 | 77% | 0.1 |
| Library 2 plasma | 0.76 | 0.2 | 0.166 | 0.3 | — | — | |
| Sorted Library 3 | 0.0018 | 71.9 | 0.0047 | 11 | 3,042 | 19% | 0.5 |
| Library 3 plasma | 0.056 | 2.3 | 0.032 | 1.7 | — | — | |
| Sorted Library 4 | 0.002 | 64.7 | 0.002 | 26 | 3,069 | 18% | 0.5 |
| Library 4 plasma | 0.031 | 4.2 | 0.038 | 1.4 | — | — | |
| Sorted Library 5 | 0.00082 | 157.8 | 0.0017 | 31 | 2,122 | 58% | 0.5 |
| Library 5 plasma | 0.049 | 2.6 | 0.042 | 1.3 | — | — | |
| Sorted Library 6 | 0.00034 | 380.5 | 0.00043 | 123 | 1,656 | 51% | 1.5 |
| Library 6 plasma | 0.039 | 3.3 | 0.045 | 1.2 | — | — | |
| Sorted Library 7 | 0.00032 | 404.3 | 0.00095 | 56 | 1,768 | 40% | 1.9 |
| Library 7 plasma | 0.024 | 5.4 | 0.018 | 2.9 | — | — | |
| Sorted Library 8 | 0.00017 | 761.0 | 0.00048 | 110 | 1,214 | 68% | 1.15 |
| Library 8 plasma | 0.061 | 2.1 | 0.066 | 0.8 | — | — | |

TABLE 9
Characteristics of the rCIG CHO cell library. The IgG isotype refers to what isotype the variable
region was prior to conversion of the sequence to IgG1 for expression in CHO.

| | | | | | | Jaccard | Morisita | | | | |
|---|---|---|---|---|---|---|---|---|---|---|---|
| | # Ab | # Ab | | | | overlap | overlap | | | | |
| | clones | clones | | | # | to | to | | | | |
| Library/ | (unique | (combined | Shannon | Simpson | sequencing | scFv | scFv | % IgG isotype | | | |
| Sample | CDR3) | CDR3) | entropy | index | reads | library | library | IgG1 | IgG2 | IgG3 | IgG4 |
| rCIG | 12,500 | 2,529 | 3.4 | 0.94 | 1,234,402 | 43% | 74% | 78.1 | 16.6 | 4.7 | 0.6 |
| IVIG | — | — | — | — | — | — | — | — | — | — | — |
| (Gamunex) | | | | | | | | | | | |
| SARS CoV | — | — | — | — | — | — | — | — | — | — | — |
| mAb | | | | | | | | | | | |
| [CR3022] | | | | | | | | | | | |
| SARS CoV-2 | — | — | — | — | — | — | — | — | — | — | — |
| mAb | | | | | | | | | | | |
| [SAD-535] | | | | | | | | | | | |
| | | | | | | Antigen binding EC50 (mg/ml) | | | | | |
| | | | Spike:AC | CoV-2 | CoV-2 | | | CoV- | | | |
| | CoV-2 | CoV-2 | E2 plate- | pseudo- | live virus | CoV- | | 2 | | | |
| | S1 | RBD | based | type | neutrali- | 2 S | CoV- | RBD | CoV- | | |
| | binding | binding | neutrali- | neutrali- | ation | (R68 | 2 | (N35 | 2 | CoV-2 | CoV- |
| | EC50 | EC50 | zation | zation | concen- | 3A, | RBD | 4D, | RBD | RBD | 2 S |
| Library/ | (mg/ | (mg/ | IC50 | IC50 | tration | R685 | (N35 | D364 | (V36 | (W43 | (D61 |
| Sample | ml) | ml) | (mg/ml) | (mg/ml) | (mg/ml) | A) | 4D) | Y) | 7F) | 6R) | 4G) |
| rCIG | 0.000092 | 0.0001 | 0.0022 | 0.00043 | 0.00041 | 0.00009 | 0.00007 | 0.00008 | 0.00007 | 0.00007 | 0.00005 |
| IVIG | 1.38 | 1.25 | None | None | None | 2.84 | 1.24 | 1.32 | 1.13 | 1.24 | 1.33 |
| (Gamunex) | | | | | | | | | | | |
| SARS | 0.000078 | 0.000088 | None | 0.1 | NT | NT | NT | NT | NT | NT | NT |
| CoV | | | | | | | | | | | |
| mAb | | | | | | | | | | | |
| [CR3022] | | | | | | | | | | | |
| SARS | 0.000058 | 0.000057 | 0.0011 | 0.00026 | NT | 0.00005 | 0.00004 | 0.00005 | 0.00004 | 0.00004 | 0.00003 |
| CoV-2 | | | | | | | | | | | |
| mAb | | | | | | | | | | | |
| [SAD-S35] | | | | | | | | | | | |

| | Antigen binding EC50 (mg/ml) | | | | | | |
|---|---|---|---|---|---|---|---|
| | HCo | HCo | ME | SAR | | | |
| | V-229 | V-NL6 | RS CoV | S CoV | | | |
| Library/ | E S1 | 3 S1 | S1 | RBD | Endotoxin | Monomer | Monomer |
| Sample | NB | NB | NB | 0.0006 | (EU/mg) | (Protein A) | (Polished) |
| rCIG | 0.096 | 0.14 | 1.33 | 1.28 | 0.12 | 78.5% | 98.3% |
| IVIG | | | | | — | — | — |
| (Gamunex) | NT | NT | NT | NT | | | |
| SARS CoV | NB | NB | NB | NB | — | — | — |
| mAb | | | | | | | |
| [CR3022] | | | | | | | |
| SARS | | | | | — | — | — |
| CoV-2 | | | | | | | |
| mAb [SAD- | | | | | | | |
| S35] | | | | | | | |

NB, no binding observed (expected to be similar to IVIG if a higher concentration could be tested).
NT, not tested

TABLE 10
Characterization of the rZIG scFv library.

| | # input | # Ab clones | # Ab clones | Shannon | Simpson | # sequencing |
|---|---|---|---|---|---|---|
| Library | cells | (unique CDR3) | (combined CDR3) | entropy | index | reads |
| rZIG | 2,080,000 | 119,700 | 33,561 | 5.6 | 0.99 | 1,128,316 |

TABLE 11
Characteristics of the rZIG CHO cell libraries.

| | | | | | | Jaccard | Morisita | Jaccard | Morisita | |
|---|---|---|---|---|---|---|---|---|---|---|
| | # Ab | # Ab | | | | overlap | overlap | overlap | overlap | |
| | clones | clones | | | # | to | to | between rZIG- | between | |
| Library/ | (unique | (combined | Shannon | Simpson | sequencing | scFv | scFv | IgG1 and rZIG- | rZIG-IgG1 | |
| Sample | CDR3) | CDR3) | entropy | index | reads | library | library | LALA | and rZIG-LALA | |
| rZIG-IgG1 | 33,642 | 4,692 | 5.4 | 0.99 | 1,580,084 | 40% | 56% | 58% | 86% | |
| rZIG-LALA | 26,708 | 3,674 | 5.2 | 0.97 | 1,500,424 | 35% | 37% | | | |
| IVIG | — | — | — | — | — | — | — | — | — | |
| Zika/ | — | — | — | — | — | — | — | — | — | |
| Dengue + | | | | | | | | | | |
| serum | | | | | | | | | | |
| Zika/ | — | — | — | — | — | — | — | — | — | |
| Dengue + | | | | | | | | | | |
| mAb | | | | | | | | | | |
| | Binding EC50 (μg/ml) | | | | | Neutralization IC50 (μg/ml) | | | | |
| | | Dengue | Dengue | Dengue | Dengue | | Dengue | Dengue | Dengue | Dengue |
| Library/ | | serotype | serotype | serotype | serotype | | serotype | serotype | serotype | serotype |
| Sample | Zika | 1 | 2 | 3 | 4 | Zika | 1 | 2 | 3 | 4 |
| rZIG-IgG1 | 1.13 | 0.89 | 1.55 | 1.21 | 1.31 | 0.28 | 7.24 | 1.01 | 5.88 | 1.51 |
| rZIG-LALA | 1.77 | 1.46 | 2.60 | 1.79 | 2.61 | 0.33 | 21.5 | 0.39 | 3.86 | 2.58 |
| IVIG | None | None | None | None | None | None | 12.2 | None | None | None |
| Zika/ | 141.8 | 133.8 | 128.1 | 131.8 | 135.6 | 34.7 | 2.5 | 4.94 | 6.79 | 5.39 |
| Dengue + serum | | | | | | | | | | |
| Zika/Dengue + | NT | NT | NT | NT | NT | 0.098 | 0.048 | 0.21 | 0.28 | 0.12 |
| mAb | | | | | | | | | | |

| Library/Sample | Endotoxin (EU/mg) | Monomer |
|---|---|---|
| rZIG-IgG1 | <0.04 | 97.8% |
| rZIG-LALA | <0.09 | 97% |
| IVIG | — | — |
| Zika/Dengue+ | — | — |
| serum | | |
| Zika/Dengue+ | | |
| mAb | | |

NT, Not tested

TABLE 12
Characterization of the rHIG and rPIG scFv libraries.

| | | # Ab | # Ab | | | |
|---|---|---|---|---|---|---|
| | # | clones | clones | Shan- | Simp- | # |
| | input | (unique | (combined | non | son | sequencing |
| Library | cells | CDR3) | CDR3) | entropy | index | reads |
| rHIG | 1,180,000 | 75,311 | 21,169 | 7.3 | 0.99 | 1,062,125 |
| rPIG | 4,240,000 | 85,497 | 38,252 | 4.5 | 0.98 | 799,462 |

TABLE 13
Characteristics of the rHIG CHO cell library.

| | | | | | | | | | SBA assay (lowest | | | |
|---|---|---|---|---|---|---|---|---|---|---|---|---|
| | | | | | | | | | concentration where | | | |
| | | | | | | | | | ≥50% inhibition | | | |
| | # Ab | # Ab | | | | Jaccard | Morisita | Hib | was observed; | | | |
| | clones | clones | | | # | overlap to | overlap | binding | μg/mL) | | | |
| Library/ | (unique | (combined | Shannon | Simpson | sequencing | scFv | to scFv | EC50 | ATCC | Eagan | Endotoxin | Mono- |
| Sample | CDR3) | CDR3) | entropy | index | reads | library | library | (μg/ml) | 10211 strain | strain | (EU/mg) | mer |
| rHIG | 49,206 | 6,381 | 6.8 | 0.99 | 1,389,205 | 40% | 59% | 0.2 | 0.82 | 2.47 | 0.03 | 97.7% |
| IVIG | — | — | — | — | — | — | — | 46.6 | None | None | — | — |
| (Gamunex) | | | | | | | | | | | | |

SBA, serum bactericidal assay

TABLE 14
Characteristics of the rPIG CHO cell library.

| | # Ab | # Ab | | | | | | | | |
|---|---|---|---|---|---|---|---|---|---|---|
| | clones | clones | | | | Jaccard | | | | |
| Library/ | (unique | (combined | Shannon | Simpson | # sequencing | overlap to | Morisita overlap | Binding EC50 to pool of 23 | | |
| Sample | CDR3) | CDR3) | entropy | index | reads | scFv library | to scFv library | pneumococcus serotypes (μg/ml) | | |
| rHIG | 17,938 | 3,178 | 4.4 | 0.97 | 1,450,945 | 41% | 77% | 0.055 | | |
| IVIG | — | — | — | — | — | — | — | 4.7 | | |
| (Gamunex) | | | | | | | Fold over IVIG: | 85 | | |
| Library/ | | Concentration of pneumococcus serotype-specific antibodies (μg/mg) | | | | | | | | |
| Sample | 1 | 3 | 4 | 5 | 6A | 6B | 7F | 9V | | |
| rPIG | 21.7 | 6.6 | 0.4 | 2.2 | none | 0.2 | none | 5.0 | | |
| IVIG | 0.11 | 0.05 | 0.05 | 0.11 | 0.15 | 0.13 | 0.11 | 0.13 | | |
| (Gamunex) | | | | | | | | | | |
| | 203 | 140 | 6.98 | 20.1 | — | 1.72 | — | 39.4 | | |
| Library/ | Concentration of pneumococcus serotype-specific antibodies (μg/mg) | | | | | | | | | |
| Sample | 12F | 14 | 18C | 19A | 19F | 22F | 23F | 33F | | |
| rPIG | 1.0 | 53.1 | 4.1 | 5.5 | 5.1 | 1.3 | 0.5 | 10.1 | | |
| IVIG | 0.05 | 0.47 | 0.11 | 0.39 | 0.23 | 0.14 | 0.09 | 0.20 | | |
| (Gamunex) | | | | | | | | | | |
| | 20.3 | 113 | 36 | 14 | 22.4 | 9.55 | 5.48 | 49.9 | | |
| Library/ | Pneumococcus serotype-specific opsonophagocytosis index | | | | | | | | | |
| Sample | 1 | 3 | 4 | 5 | 6A | 6B | 7F | 9V | | |
| rPIG | 8 | 277 | 76 | 61 | 17 | 15 | 189 | 56 | | |
| IVIG | 8 | 8 | 11 | 8 | 26 | 15 | 47 | 56 | | |
| (Gamunex) | | | | | | | | | | |
| | 1 | 34.6 | 6.91 | 7.63 | 0.65 | 1 | 4.02 | 1 | | |
| Library/ | Pneumococcus serotype-specific opsonophagocytosis index | | | | | | | | Endotoxin | |
| Sample | 12F | 14 | 18C | 19A | 19F | 22F | 23F | 33F | (EU/mg) | Monomer |
| rPIG | 620 | 727 | 357 | 72 | 72 | 96 | 45 | 147 | 0.03 | 98.6% |
| IVIG | 23 | 46 | 66 | 20 | 13 | 39 | 27 | 57 | — | — |
| (Gamunex) | | | | | | | | | | |
| | 27 | 15.8 | 5.41 | 3.6 | 5.54 | 2.46 | 1.67 | 2.58 | | |

TABLE 15
Characteristics of the IVIG +
rHIG/rPIG mixture.

| | | Binding |
|---|---|---|
| | | EC50 to pool |
| | Hib | of 23 |
| | binding | pneumococcus |
| | EC50 | serotypes |
| Library/Sample | (μg/ml) | (μg/ml) |
| IVIG + rHIG/rPIG | 2.54 | 0.3 |
| IVIG (Gamunex) | 46.6 | 2.49 |
| Fold over IVIG: | 18.3 | 8.3 |

TABLE 16
Characterization of the rhATG scFv libraries.

| | | # Ab clones | # Ab clones | Shannon | Simpson | # sequencing |
|---|---|---|---|---|---|---|
| Library | # input cells | (unique CDR3) | (combined CDR3) | entropy | index | reads |
| rhATG (T cells; bone marrow) | 150,000 | 13,314 | 2,211 | 2.9 | 0.90 | 807,164 |
| rhATG (T cells; lymph node) | 1,640,000 | 34,324 | 5,605 | 4.0 | 0.92 | 1,189,267 |
| rhATG (Thymocytes; lymph node) | 2,060,000 | 22,030 | 4,216 | 3.8 | 0.95 | 632,083 |
| rhATG (Thymocytes; spleen) | 1,730,000 | 32,604 | 7,327 | 4.3 | 0.96 | 923,203 |

The application's sequence listing, which the Patent Office published only in electronic form, follows.

SEQUENCE LISTING (8409 sequences)

SEQ ID NO: 1 - protein, 10 aa, Homo sapiens
  Light chain CDR3 for antibody 1 (IGKV1-9)
QQVNSYPGPT

SEQ ID NO: 2 - protein, 12 aa, Homo sapiens
  Heavy chain CDR3 for antibody 1 (IGHV3-66)
ARDLSAAGGFDY

SEQ ID NO: 3 - protein, 8 aa, Homo sapiens
  Light chain CDR3 for antibody 2 (IGKV3-11)
QQRSNWFT

SEQ ID NO: 4 - protein, 17 aa, Homo sapiens
  Heavy chain CDR3 for antibody 2 (IGHV1-2)
ARAGAAGTPYYYYYMDV

SEQ ID NO: 5 - protein, 9 aa, Homo sapiens
  Light chain CDR3 for antibody 3 (IGKV1-6)
LQDYNYPWT

SEQ ID NO: 6 - protein, 18 aa, Homo sapiens
  Heavy chain CDR3 for antibody 3 (IGHV2-5)
AHYSGYSYGYPRAYGMDV

SEQ ID NO: 7 - protein, 8 aa, Homo sapiens
  Light chain CDR3 for antibody 4 (IGKV2D-28)
MQALQTPT

SEQ ID NO: 8 - protein, 17 aa, Homo sapiens
  Heavy chain CDR3 for antibody 4 (IGHV1-69)
ARGLLWFGADYYYGMDV

SEQ ID NO: 9 - protein, 9 aa, Homo sapiens
  Light chain CDR3 for antibody 5 (IGKV1-9)
QQLNSYPVA

SEQ ID NO: 10 - protein, 10 aa, Homo sapiens
  Heavy chain CDR3 for antibody 5 (IGHV3-66)
ARDLRSYYDY

SEQ ID NO: 11 - protein, 10 aa, Homo sapiens [sequence omitted]

SEQ ID NO: 12 - protein, 17 aa, Homo sapiens
  Heavy chain CDR3 for antibody 6 (IGHV1-2)
AREPSISRDGYSGYDDY

SEQ ID NO: 13 - protein, 11 aa, Homo sapiens
  Light chain CDR3 for antibody 7 (IGKV1-12)
QQANSFPPLFT

SEQ ID NO: 14 - protein, 12 aa, Homo sapiens
  Heavy chain CDR3 for antibody 7 (IGHV3-66)
ARDLEEQGAFDI

SEQ ID NO: 15 - protein, 9 aa, Homo sapiens
  Light chain CDR3 for antibody 8 (IGKV1-12)
QQANSFPYS

SEQ ID NO: 16 - protein, 11 aa, Homo sapiens
  Heavy chain CDR3 for antibody 8 (IGHV3-66)
ARETMVYGMDV

SEQ ID NO: 17 - protein, 10 aa, Homo sapiens
  Light chain CDR3 for antibody 9 (IGKV1-9)
QQLDTYPGPT

SEQ ID NO: 18 - protein, 12 aa, Homo sapiens
  Heavy chain CDR3 for antibody 9 (IGHV3-66)
ARDLSAAGGFDY

SEQ ID NO: 19 - protein, 9 aa, Homo sapiens
  Light chain CDR3 for antibody 10 (IGKV1-9)
QQLNSYSYT

SEQ ID NO: 20 - protein, 9 aa, Homo sapiens
  Heavy chain CDR3 for antibody 10 (IGHV3-53)
ARESYGMDV

SEQ ID NO: 21 - protein, 9 aa, Homo sapiens
  Light chain CDR3 for antibody 11 (IGKV3-20)
QQYGSSLYT

SEQ ID NO: 22 - protein, 16 aa, Homo sapiens
  Heavy chain CDR3 for antibody 11 (IGHV1-18)
ARANPGAVGYYYGMDV

SEQ ID NO: 23 - protein, 10 aa, Homo sapiens [sequence omitted]

SEQ ID NO: 24 - protein, 17 aa, Homo sapiens
  Heavy chain CDR3 for antibody 12 (IGHV1-69)
ARHSSDGDYYYYYGMDV

SEQ ID NO: 25 - protein, 9 aa, Homo sapiens
  Light chain CDR3 for antibody 13 (IGKV1-9)
QQLNSYPQT

SEQ ID NO: 26 - protein, 11 aa, Homo sapiens
  Heavy chain CDR3 for antibody 13 (IGHV3-53)
ARDLQVYGMDV

SEQ ID NO: 27 - protein, 9 aa, Homo sapiens
  Light chain CDR3 for antibody 14 (IGKV2D-28)
MQALQTPYT

SEQ ID NO: 28 - protein, 23 aa, Homo sapiens
  Heavy chain CDR3 for antibody 14 (IGHV1-2)
ARMPRPGWSPSWFGETDHRPLDY

SEQ ID NO: 29 - protein, 9 aa, Homo sapiens
  Light chain CDR3 for antibody 15 (IGKV1-9)
QQLNSYPPS

SEQ ID NO: 30 - protein, 22 aa, Homo sapiens
  Heavy chain CDR3 for antibody 15 (IGHV1-46)
AREGGLRVYDSSGYDTGYAFDI

SEQ ID NO: 31 - protein, 9 aa, Homo sapiens
  Light chain CDR3 for antibody 16 (IGKV1-17)
LQHNSYPRT

SEQ ID NO: 32 - protein, 16 aa, Homo sapiens
  Heavy chain CDR3 for antibody 16 (IGHV4-34)
ARGCSGGSCYPNPFDY

SEQ ID NO: 33 - protein, 9 aa, Homo sapiens
  Light chain CDR3 for antibody 17 (IGKV1-9)
QQLNSYPPP

SEQ ID NO: 34 - protein, 11 aa, Homo sapiens
  Heavy chain CDR3 for antibody 17 (IGHV3-53)
ARDLGPYGMDV

SEQ ID NO: 35 - protein, 9 aa, Homo sapiens
  Light chain CDR3 for antibody 18 (IGKV1-39)
QQSYSTPPT

SEQ ID NO: 36 - protein, 16 aa, Homo sapiens
  Heavy chain CDR3 for antibody 18 (IGHV3-33)
AREVDTAMDRTILWDY

SEQ ID NO: 37 - protein, 9 aa, Homo sapiens
  Light chain CDR3 for antibody 19 (IGKV1-9)
QQLNSYPVA

SEQ ID NO: 38 - protein, 12 aa, Homo sapiens
  Heavy chain CDR3 for antibody 19 (IGHV3-66)
ARDLSAAGGFDY

SEQ ID NO: 39 - protein, 10 aa, Homo sapiens
  Light chain CDR3 for antibody 20 (IGKV1-9)
QQVNSYPGPT

SEQ ID NO: 40 - protein, 10 aa, Homo sapiens
  Heavy chain CDR3 for antibody 20 (IGHV3-66)
ARDLRSYYDY

SEQ ID NO: 41 - protein, 10 aa, Homo sapiens
  Light chain CDR3 for antibody 21 (IGKV1-39)
QQSYSTPPLT

SEQ ID NO: 42 - protein, 20 aa, Homo sapiens
  Heavy chain CDR3 for antibody 21 (IGHV3-13)
ARVGYYYDSSGLKHYWYFDL

SEQ ID NO: 43 - protein, 9 aa, Homo sapiens
  Light chain CDR3 for antibody 22 (IGKV1-33)
QQYDNLPPT

SEQ ID NO: 44 - protein, 13 aa, Homo sapiens
  Heavy chain CDR3 for antibody 22 (IGHV4-31)
ARDYGGNANYFDY

SEQ ID NO: 45 - protein, 9 aa, Homo sapiens
  Light chain CDR3 for antibody 23 (IGKV1-39)
QQSYSTPPT

SEQ ID NO: 46 - protein, 19 aa, Homo sapiens
  Heavy chain CDR3 for antibody 23 (IGHV1-69)
ARAHRSSTSYRLGINWFDP

SEQ ID NO: 47 - protein, 9 aa, Homo sapiens
  Light chain CDR3 for antibody 24 (IGKV1-12)
QQANSFPPT

SEQ ID NO: 48 - protein, 17 aa, Homo sapiens
  Heavy chain CDR3 for antibody 24 (IGHV4/OR15-8)
ARDLTDYGDHGGYWFDP

SEQ ID NO: 49 - protein, 9 aa, Homo sapiens
  Light chain CDR3 for antibody 25 (IGKV1-33)
QQYDNLPLT

SEQ ID NO: 50 - protein, 13 aa, Homo sapiens
  Heavy chain CDR3 for antibody 25 (IGHV4-31)
ARDYGGNSAQFGY

SEQ ID NO: 51 - protein, 10 aa, Homo sapiens
  Light chain CDR3 for antibody 26 (IGKV1-33)
QQYDNLPSLT

SEQ ID NO: 52 - protein, 11 aa, Homo sapiens
  Heavy chain CDR3 for antibody 26 (IGHV3-66)
ARWAWTPIFDY

SEQ ID NO: 53 - protein, 10 aa, Homo sapiens
  Light chain CDR3 for antibody 27 (IGKV3-11)
QQRSNWPRAT

SEQ ID NO: 54 - protein, 18 aa, Homo sapiens
  Heavy chain CDR3 for antibody 27 (IGHV3-30)
AKDGSWYYDSSGYPVFDY

SEQ ID NO: 55 - protein, 9 aa, Homo sapiens
  Light chain CDR3 for antibody 28 (IGKV1-33)
QQYDNLPLT

SEQ ID NO: 56 - protein, 11 aa, Homo sapiens
  Heavy chain CDR3 for antibody 28 (IGHV3-53)
ARDGRGDLWSY

SEQ ID NO: 57 - protein, 10 aa, Homo sapiens
  Light chain CDR3 for antibody 29 (IGKV1-33)
QQYDNLPGVT

SEQ ID NO: 58 - protein, 20 aa, Homo sapiens
  Heavy chain CDR3 for antibody 29 (IGHV2-26)
ARTTYYYDSSGYYPLNYFDY

SEQ ID NO: 59 - protein, 9 aa, Homo sapiens
  Light chain CDR3 for antibody 30 (IGKV1-33)
QQYDNLPYS

SEQ ID NO: 60 - protein, 16 aa, Homo sapiens
  Heavy chain CDR3 for antibody 30 (IGHV4-61)
ARDGSYSSSWKNWFDP

SEQ ID NO: 61 - protein, 10 aa, Homo sapiens [sequence omitted]

SEQ ID NO: 62 - protein, 17 aa, Homo sapiens
  Heavy chain CDR3 for antibody 31 (IGHV1-2)
ARAGAAGTPYYYYYMDV

SEQ ID NO: 63 - protein, 9 aa, Homo sapiens
  Light chain CDR3 for antibody 32 (IGKV1-12)
QQANSFPFT

SEQ ID NO: 64 - protein, 17 aa, Homo sapiens
  Heavy chain CDR3 for antibody 32 (IGHV4-59)
ARSPRGWLEQQPGYFDY

SEQ ID NO: 65 - protein, 8 aa, Homo sapiens
  Light chain CDR3 for antibody 33 (IGKV3-11)
QQRSNWFT

SEQ ID NO: 66 - protein, 12 aa, Homo sapiens
  Heavy chain CDR3 for antibody 33 (IGHV3-66)
ARDLSAAGGFDY

SEQ ID NO: 67 - protein, 11 aa, Homo sapiens
  Light chain CDR3 for antibody 34 (IGKV1-12)
QQANSFPPLFT

SEQ ID NO: 68 - protein, 12 aa, Homo sapiens
  Heavy chain CDR3 for antibody 34 (IGHV3-66)
ARDLSAAGGFDY

SEQ ID NO: 69 - protein, 10 aa, Homo sapiens
  Light chain CDR3 for antibody 35 (IGKV1-9)
QQVNSYPGPT

SEQ ID NO: 70 - protein, 18 aa, Homo sapiens
  Heavy chain CDR3 for antibody 35 (IGHV2-5)
AHYSGYSYGYPRAYGMDV

SEQ ID NO: 71 - protein, 8 aa, Homo sapiens
  Light chain CDR3 for antibody 36 (IGKV3-11)
QQRSNWFT

SEQ ID NO: 72 - protein, 17 aa, Homo sapiens
  Heavy chain CDR3 for antibody 36 (IGHV1-2)
AREPSISRDGYSGYDDY

SEQ ID NO: 73 - protein, 10 aa, Homo sapiens
  Light chain CDR3 for antibody 37 (IGKV1-9)
QQVNSYPGPT

SEQ ID NO: 74 - protein, 17 aa, Homo sapiens
  Heavy chain CDR3 for antibody 37 (IGHV1-2)
ARAGAAGTPYYYYYMDV

SEQ ID NO: 75 - protein, 10 aa, Homo sapiens
  Light chain CDR3 for antibody 38 (IGKV1-39)
QQSYSTPPST

SEQ ID NO: 76 - protein, 14 aa, Homo sapiens
  Heavy chain CDR3 for antibody 38 (IGHV3-13)
ARGGGSSWYWYFDL

SEQ ID NO: 77 - protein, 10 aa, Homo sapiens
  Light chain CDR3 for antibody 39 (IGKV4-1)
QQYYSTPLYT

SEQ ID NO: 78 - protein, 17 aa, Homo sapiens
  Heavy chain CDR3 for antibody 39 (IGHV1-69)
ARGAEGIVVERGQPFDF

SEQ ID NO: 79 - protein, 8 aa, Homo sapiens
  Light chain CDR3 for antibody 40 (IGKV2D-28)
MQALQTPT

SEQ ID NO: 80 - protein, 17 aa, Homo sapiens
  Heavy chain CDR3 for antibody 40 (IGHV1-2)
ARAGAAGTPYYYYYMDV

SEQ ID NO: 81 - protein, 8 aa, Homo sapiens
  Light chain CDR3 for antibody 41 (IGKV2D-28)
MQALQTPT

SEQ ID NO: 82 - protein, 12 aa, Homo sapiens
  Heavy chain CDR3 for antibody 41 (IGHV3-66)
ARDLSAAGGFDY

SEQ ID NO: 83 - protein, 9 aa, Homo sapiens
  Light chain CDR3 for antibody 42 (IGKV1-6)
LQDYNYPWT

SEQ ID NO: 84 - protein, 12 aa, Homo sapiens
  Heavy chain CDR3 for antibody 42 (IGHV3-66)
ARDLSAAGGFDY

SEQ ID NO: 85 - protein, 10 aa, Homo sapiens
  Light chain CDR3 for antibody 43 (IGKV1-9)
QQLNSYPGPT

SEQ ID NO: 86 - protein, 12 aa, Homo sapiens
  Heavy chain CDR3 for antibody 43 (IGHV3-66)
ARDLSEAGGFDY

SEQ ID NO: 87 - protein, 11 aa, Homo sapiens
  Light chain CDR3 for antibody 44 (IGKV3-15)
QQYNNWPPMYT

SEQ ID NO: 88 - protein, 12 aa, Homo sapiens
  Heavy chain CDR3 for antibody 44 (IGHV3-53)
ARDLGSVGATDY

SEQ ID NO: 89 - protein, 9 aa, Homo sapiens
  Light chain CDR3 for antibody 45 (IGKV1-12)
QQANSFPYS

SEQ ID NO: 90 - protein, 12 aa, Homo sapiens
  Heavy chain CDR3 for antibody 45 (IGHV3-66)
ARDLSAAGGFDY

SEQ ID NO: 91 - protein, 10 aa, Homo sapiens
  Light chain CDR3 for antibody 46 (IGKV1-9)
QQVNSYPGPT

SEQ ID NO: 92 - protein, 12 aa, Homo sapiens
  Heavy chain CDR3 for antibody 46 (IGHV3-66)
ARDLEEQGAFDI

SEQ ID NO: 93 - protein, 9 aa, Homo sapiens
  Light chain CDR3 for antibody 47 (IGKV3-20)
QQYGSSPLT

SEQ ID NO: 94 - protein, 12 aa, Homo sapiens
  Heavy chain CDR3 for antibody 47 (IGHV3-66)
ARDLSEAGGFDY

SEQ ID NO: 95 - protein, 9 aa, Homo sapiens
  Light chain CDR3 for antibody 48 (IGKV3-20)
QQYASSPIT

SEQ ID NO: 96 - protein, 12 aa, Homo sapiens
  Heavy chain CDR3 for antibody 48 (IGHV3-66)
ARDLEEQGAFDI

SEQ ID NO: 97 - protein, 9 aa, Homo sapiens
  Light chain CDR3 for antibody 49 (IGKV1-33)
QQYDNLPPA

SEQ ID NO: 98 - protein, 20 aa, Homo sapiens
  Heavy chain CDR3 for antibody 49 (IGHV3-NL1)
AKQLGQYCSGGSCYSGYFDY

SEQ ID NO: 99 - protein, 10 aa, Homo sapiens
  Light chain CDR3 for antibody 50 (IGKV3-11)
QQRSNWPPFT

SEQ ID NO: 100 - protein, 15 aa, Homo sapiens
  Heavy chain CDR3 for antibody 50 (IGHV1-46)
ARDIVVVPAAMGLDY

SEQ ID NO: 101 - protein, 8 aa, Homo sapiens
  Light chain CDR3 for antibody 51 (IGKV3-11)
QQRSNWFT

SEQ ID NO: 102 - protein, 16 aa, Homo sapiens
  Heavy chain CDR3 for antibody 51 (IGHV1-2)
ARAGAAGTPYYYYMDV

SEQ ID NO: 103 - protein, 9 aa, Homo sapiens
  Light chain CDR3 for antibody 52 (IGKV3-20)
HQYVSSPHT

SEQ ID NO: 104 - protein, 12 aa, Homo sapiens
  Heavy chain CDR3 for antibody 52 (IGHV5-51)
ARQGYYGDYFDS

SEQ ID NO: 105 - protein, 10 aa, Homo sapiens
  Light chain CDR3 for antibody 53 (IGKV3-20)
QQYGSSPPYT

SEQ ID NO: 106 - protein, 12 aa, Homo sapiens
  Heavy chain CDR3 for antibody 53 (IGHV3-66)
ARDLSAAGGFDY

SEQ ID NO: 107 - protein, 9 aa, Homo sapiens
  Light chain CDR3 for antibody 54 (IGKV3-20)
QQYGSSPPT

SEQ ID NO: 108 - protein, 20 aa, Homo sapiens
  Heavy chain CDR3 for antibody 54 (IGHV1-2)
ASGTYYYDSSGYYWNDAFDI

SEQ ID NO: 109 - protein, 8 aa, Homo sapiens
  Light chain CDR3 for antibody 55 (IGKV3-11)
QQRSNWFT

SEQ ID NO: 110 - protein, 17 aa, Homo sapiens
  Heavy chain CDR3 for antibody 55 (IGHV1-69)
ARGLLWFGADYYYGMDV

SEQ ID NO: 111 - protein, 8 aa, Homo sapiens
  Light chain CDR3 for antibody 56 (IGKV3-11)
QQRSNWFT

SEQ ID NO: 112 - protein, 18 aa, Homo sapiens
  Heavy chain CDR3 for antibody 56 (IGHV2-5)
AHYSGYSYGYPRAYGMDV

SEQ ID NO: 113 - protein, 9 aa, Homo sapiens
  Light chain CDR3 for antibody 57 (IGKV3-20)
QQYGSSPLT

SEQ ID NO: 114 - protein, 20 aa, Homo sapiens
  Heavy chain CDR3 for antibody 57 (IGHV4-39)
ARTGHLIRFLEWLPINWFDP

SEQ ID NO: 115 - protein, 10 aa, Homo sapiens
  Light chain CDR3 for antibody 58 (IGKV1-33)
QQYDNLLLLT

SEQ ID NO: 116 - protein, 11 aa, Homo sapiens
  Heavy chain CDR3 for antibody 58 (IGHV4-31)
ARWSSSGSFDY

SEQ ID NO: 117 - protein, 9 aa, Homo sapiens
  Light chain CDR3 for antibody 59 (IGKV1-39)
QQSYSTPFT

SEQ ID NO: 118 - protein, 14 aa, Homo sapiens
  Heavy chain CDR3 for antibody 59 (IGHV1-69)
AKNEASALLAWFDP

SEQ ID NO: 119 - protein, 9 aa, Homo sapiens
  Light chain CDR3 for antibody 60 (IGKV3-20)
QQYGSSPLT

SEQ ID NO: 120 - protein, 16 aa, Homo sapiens
  Heavy chain CDR3 for antibody 60 (IGHV4/OR15-8)
ARYATAPIKQYNWFDP

SEQ ID NO: 121 - protein, 10 aa, Homo sapiens
  Light chain CDR3 for antibody 61 (IGKV1-9)
QQVNSYPGPT

SEQ ID NO: 122 - protein, 11 aa, Homo sapiens
  Heavy chain CDR3 for antibody 61 (IGHV3-66)
ARETMVYGMDV

SEQ ID NO: 123 - protein, 8 aa, Homo sapiens
  Light chain CDR3 for antibody 62 (IGKV1-NL1)
QQYYSTRT

SEQ ID NO: 124 - protein, 9 aa, Homo sapiens
  Heavy chain CDR3 for antibody 62 (IGHV4/OR15-8)
ARVLGAMFT

SEQ ID NO: 125 - protein, 9 aa, Homo sapiens
  Light chain CDR3 for antibody 63 (IGKV1-9)
QQLNSYPVA

SEQ ID NO: 126 - protein, 18 aa, Homo sapiens
  Heavy chain CDR3 for antibody 63 (IGHV2-5)
AHYSGYSYGYPRAYGMDV

SEQ ID NO: 127 - protein, 10 aa, Homo sapiens
  Light chain CDR3 for antibody 64 (IGKV1-33)
QQYDNLPPVT

SEQ ID NO: 128 - protein, 20 aa, Homo sapiens
  Heavy chain CDR3 for antibody 64 (IGHV6-1)
ARDQWGYCSGGSCYPVRFDP

SEQ ID NO: 129 - protein, 9 aa, Homo sapiens
  Light chain CDR3 for antibody 65 (IGKV1-9)
QQLNSYSYT

SEQ ID NO: 130 - protein, 12 aa, Homo sapiens
  Heavy chain CDR3 for antibody 65 (IGHV3-66)
ARDLSAAGGFDY

SEQ ID NO: 131 - protein, 9 aa, Homo sapiens
  Light chain CDR3 for antibody 66 (IGKV1-39)
QRTDSVPHS

SEQ ID NO: 132 - protein, 17 aa, Homo sapiens
  Heavy chain CDR3 for antibody 66 (IGHV2-70)
ARTHYDILTGHEAPFDY

SEQ ID NO: 133 - protein, 10 aa, Homo sapiens
  Light chain CDR3 for antibody 67 (IGKV1-9)
QQVNSYPGPT

SEQ ID NO: 134 - protein, 11 aa, Homo sapiens
  Heavy chain CDR3 for antibody 67 (IGHV3-53)
ARDLQVYGMDV

SEQ ID NO: 135 - protein, 9 aa, Homo sapiens
  Light chain CDR3 for antibody 68 (IGKV1-33)
QQYDNLPLT

SEQ ID NO: 136 - protein, 19 aa, Homo sapiens
  Heavy chain CDR3 for antibody 68 (IGHV4-61)
ARRRKYYYGSGSYYNAYDY

SEQ ID NO: 137 - protein, 9 aa, Homo sapiens
  Light chain CDR3 for antibody 69 (IGKV1-27)
QKYNSAPLT

SEQ ID NO: 138 - protein, 16 aa, Homo sapiens
  Heavy chain CDR3 for antibody 69 (IGHV1-69)
ARDHSGSYYYYYGMDV

SEQ ID NO: 139 - protein, 9 aa, Homo sapiens
  Light chain CDR3 for antibody 70 (IGKV1-39)
QQSHTFPLT

SEQ ID NO: 140 - protein, 20 aa, Homo sapiens
  Heavy chain CDR3 for antibody 70 (IGHV4-59)
ARTPTDYDFWSGTLRNWFDP

SEQ ID NO: 141 - protein, 10 aa, Homo sapiens
  Light chain CDR3 for antibody 71 (IGKV1-33)
QQYDNLPWRS

SEQ ID NO: 142 - protein, 17 aa, Homo sapiens
  Heavy chain CDR3 for antibody 71 (IGHV3-66)
ARDVYCSSTSCTDAFDI

SEQ ID NO: 143 - protein, 9 aa, Homo sapiens
  Light chain CDR3 for antibody 72 (IGKV2D-28)
MQALQTPYT

SEQ ID NO: 144 - protein, 17 aa, Homo sapiens
  Heavy chain CDR3 for antibody 72 (IGHV1-2)
ARAGAAGTPYYYYYMDV

SEQ ID NO: 145 - protein, 10 aa, Homo sapiens
  Light chain CDR3 for antibody 73 (IGKV1-9)
QQLNSYPSIT

SEQ ID NO: 146 - protein, 11 aa, Homo sapiens
  Heavy chain CDR3 for antibody 73 (IGHV3-53)
ARDKWEGAFDI

SEQ ID NO: 147 - protein, 10 aa, Homo sapiens [sequence omitted]

SEQ ID NO: 148 - protein, 12 aa, Homo sapiens
  Heavy chain CDR3 for antibody 74 (IGHV3-66)
ARDLSAAGGFDY

SEQ ID NO: 149 - protein, 8 aa, Homo sapiens
  Light chain CDR3 for antibody 75 (IGKV1-13)
QQFNSYPS

SEQ ID NO: 150 - protein, 20 aa, Homo sapiens
  Heavy chain CDR3 for antibody 75 (IGHV3-NL1)
AKDQGEYCSGGSCYSGTFDY

SEQ ID NO: 151 - protein, 9 aa, Homo sapiens
  Light chain CDR3 for antibody 76 (IGKV3D-20)
QQFGNSPWT

SEQ ID NO: 152 - protein, 9 aa, Homo sapiens
  Heavy chain CDR3 for antibody 76 (IGHV4-30-2)
TRGGHYTDP

SEQ ID NO: 153 - protein, 9 aa, Homo sapiens
  Light chain CDR3 for antibody 77 (IGKV1-33)
QQYDNLPLT

SEQ ID NO: 154 - protein, 12 aa, Homo sapiens
  Heavy chain CDR3 for antibody 77 (IGHV3-66)
ARDLSAAGGFDY

SEQ ID NO: 155 - protein, 9 aa, Homo sapiens
  Light chain CDR3 for antibody 78 (IGKV3-20)
QQYGSSPYT

SEQ ID NO: 156 - protein, 21 aa, Homo sapiens
  Heavy chain CDR3 for antibody 78 (IGHV4/OR15-8)
AREPTVYNWNDMEYYYYGMDV

SEQ ID NO: 157 - protein, 10 aa, Homo sapiens [sequence omitted]

SEQ ID NO: 158 - protein, 18 aa, Homo sapiens
  Heavy chain CDR3 for antibody 79 (IGHV2-5)
AHYSGYSYGYPRAYGMDV

SEQ ID NO: 159 - protein, 9 aa, Homo sapiens
  Light chain CDR3 for antibody 80 (IGKV3-20)
QQYGSSPLT

SEQ ID NO: 160 - protein, 9 aa, Homo sapiens
  Heavy chain CDR3 for antibody 80 (IGHV3-53)
ARESYGMDV

SEQ ID NO: 161 - protein, 9 aa, Homo sapiens
  Light chain CDR3 for antibody 81 (IGKV1-39)
QQSYSTPPT

SEQ ID NO: 162 - protein, 12 aa, Homo sapiens
  Heavy chain CDR3 for antibody 81 (IGHV3-66)
ARDLSAAGGFDY

SEQ ID NO: 163 - protein, 10 aa, Homo sapiens
  Light chain CDR3 for antibody 82 (IGKV1-27)
QKYNSAPRRT

SEQ ID NO: 164 - protein, 12 aa, Homo sapiens
  Heavy chain CDR3 for antibody 82 (IGHV4-59)
ARGAGRYSHLDY

SEQ ID NO: 165 - protein, 9 aa, Homo sapiens
  Light chain CDR3 for antibody 83 (IGKV2D-28)
MQALQTPPT

SEQ ID NO: 166 - protein, 18 aa, Homo sapiens
  Heavy chain CDR3 for antibody 83 (IGHV1-8)
ARGGVAVPGTGYYYGVDV

SEQ ID NO: 167 - protein, 9 aa, Homo sapiens
  Light chain CDR3 for antibody 84 (IGKV1-27)
QKYNSAPWT

SEQ ID NO: 168 - protein, 12 aa, Homo sapiens
  Heavy chain CDR3 for antibody 84 (IGHV2-70)
ARGVEYYYYMDV

SEQ ID NO: 169 - protein, 9 aa, Homo sapiens
  Light chain CDR3 for antibody 85 (IGKV1-9)
QQLNSYPVA

SEQ ID NO: 170 - protein, 17 aa, Homo sapiens
  Heavy chain CDR3 for antibody 85 (IGHV1-2)
ARAGAAGTPYYYYYMDV

SEQ ID NO: 171 - protein, 10 aa, Homo sapiens
  Light chain CDR3 for antibody 86 (IGKV1-9)
QQVNSYPGPT

SEQ ID NO: 172 - protein, 9 aa, Homo sapiens
  Heavy chain CDR3 for antibody 86 (IGHV3-53)
ARESYGMDV

SEQ ID NO: 173 - protein, 9 aa, Homo sapiens
  Light chain CDR3 for antibody 87 (IGKV3-20)
QQYGSSPLT

SEQ ID NO: 174 - protein, 16 aa, Homo sapiens
  Heavy chain CDR3 for antibody 87 (IGHV4-31)
ARAGITIFGVVTAFDY

SEQ ID NO: 175 - protein, 8 aa, Homo sapiens
  Light chain CDR3 for antibody 88 (IGKV2D-28)
MQALQTPT

SEQ ID NO: 176 - protein, 17 aa, Homo sapiens
  Heavy chain CDR3 for antibody 88 (IGHV1-2)
AREPSISRDGYSGYDDY

SEQ ID NO: 177 - protein, 10 aa, Homo sapiens
  Light chain CDR3 for antibody 89 (IGKV1-33)
QQYDNLPSLT

SEQ ID NO: 178 - protein, 12 aa, Homo sapiens
  Heavy chain CDR3 for antibody 89 (IGHV3-66)
ARDLSAAGGFDY

SEQ ID NO: 179 - protein, 9 aa, Homo sapiens
  Light chain CDR3 for antibody 90 (IGKV1-6)
LQDYNYPWT

SEQ ID NO: 180 - protein, 17 aa, Homo sapiens
  Heavy chain CDR3 for antibody 90 (IGHV1-2)
ARAGAAGTPYYYYYMDV

SEQ ID NO: 181 - protein, 8 aa, Homo sapiens
  Light chain CDR3 for antibody 91 (IGKV2D-28)
MQALQTPT

SEQ ID NO: 182 - protein, 18 aa, Homo sapiens
  Heavy chain CDR3 for antibody 91 (IGHV2-5)
AHYSGYSYGYPRAYGMDV

SEQ ID NO: 183 - protein, 9 aa, Homo sapiens
  Light chain CDR3 for antibody 92 (IGKV1-39)
QQSYSTPLT

SEQ ID NO: 184 - protein, 17 aa, Homo sapiens
  Heavy chain CDR3 for antibody 92 (IGHV4-59)
ARVSRRWLQLPDYHFDY

SEQ ID NO: 185 - protein, 8 aa, Homo sapiens
  Light chain CDR3 for antibody 93 (IGKV3-11)
QQRSNWFT

SEQ ID NO: 186 - protein, 10 aa, Homo sapiens
  Heavy chain CDR3 for antibody 93 (IGHV3-66)
ARDLRSYYDY

SEQ ID NO: 187 - protein, 11 aa, Homo sapiens
  Light chain CDR3 for antibody 94 (IGKV1-33)
QQYDNLPPLYS

SEQ ID NO: 188 - protein, 12 aa, Homo sapiens
  Heavy chain CDR3 for antibody 94 (IGHV1-69)
ARDYGDYVGAVN

SEQ ID NO: 189 - protein, 9 aa, Homo sapiens
  Light chain CDR3 for antibody 95 (IGKV3-20)
QQYASSPIT

SEQ ID NO: 190 - protein, 13 aa, Homo sapiens
  Heavy chain CDR3 for antibody 95 (IGHV3-21)
TGPTGGGWGGFSY

SEQ ID NO: 191 - protein, 9 aa, Homo sapiens
  Light chain CDR3 for antibody 96 (IGKV1-33)
QQYDNLPIT

SEQ ID NO: 192 - protein, 14 aa, Homo sapiens
  Heavy chain CDR3 for antibody 96 (IGHV3-23)
AKALAAAGYDAFDI

SEQ ID NO: 193 - protein, 9 aa, Homo sapiens
  Light chain CDR3 for antibody 97 (IGKV1-6)
LQDYNYPWT

SEQ ID NO: 194 - protein, 10 aa, Homo sapiens
  Heavy chain CDR3 for antibody 97 (IGHV3-66)
ARDLRSYYDY

SEQ ID NO: 195 - protein, 9 aa, Homo sapiens
  Light chain CDR3 for antibody 98 (IGKV1-39)
QQSHTFPLT

SEQ ID NO: 196 - protein, 17 aa, Homo sapiens
  Heavy chain CDR3 for antibody 98 (IGHV4/OR15-8)
ARDLTDYGDHGGYWFDP

SEQ ID NO: 197 - protein, 9 aa, Homo sapiens
  Light chain CDR3 for antibody 99 (IGKV2D-28)
MQALQTPYT

SEQ ID NO: 198 - protein, 17 aa, Homo sapiens
  Heavy chain CDR3 for antibody 99 (IGHV1-69)
ARGLLWFGADYYYGMDV

SEQ ID NO: 199 - protein, 10 aa, Homo sapiens [sequence omitted]

SEQ ID NO: 200 - protein, 17 aa, Homo sapiens
  Heavy chain CDR3 for antibody 100 (IGHV1-69)
ARGLLWFGADYYYGMDV

SEQ ID NO: 201 - protein, 8 aa, Homo sapiens
  Light chain CDR3 for antibody 101 (IGKV3-20)
QQYGSSRS

SEQ ID NO: 202 - protein, 12 aa, Homo sapiens
  Heavy chain CDR3 for antibody 101 (IGHV1-69)
ARWGDYYDSSDY

SEQ ID NO: 203 - protein, 9 aa, Homo sapiens
  Light chain CDR3 for antibody 102 (IGKV1-39)
QQSHTFPLT

SEQ ID NO: 204 - protein, 15 aa, Homo sapiens
  Heavy chain CDR3 for antibody 102 (IGHV1-18)
ARVKRSWGEDSFAAY

SEQ ID NO: 205 - protein, 9 aa, Homo sapiens
  Light chain CDR3 for antibody 103 (IGKV4-1)
QQYYSTPLT

SEQ ID NO: 206 - protein, 10 aa, Homo sapiens
  Heavy chain CDR3 for antibody 103 (IGHV4-31)
ARGGHYEYDY

SEQ ID NO: 207 - protein, 9 aa, Homo sapiens
  Light chain CDR3 for antibody 104 (IGKV3-20)
QQYGSSLYT

SEQ ID NO: 208 - protein, 17 aa, Homo sapiens
  Heavy chain CDR3 for antibody 104 (IGHV1-2)
ARAGAAGTPYYYYYMDV

SEQ ID NO: 209 - protein, 10 aa, Homo sapiens
  Light chain CDR3 for antibody 105 (IGKV1-39)
QQSYSTPPLT

SEQ ID NO: 210 - protein, 12 aa, Homo sapiens
  Heavy chain CDR3 for antibody 105 (IGHV3-66)
ARDLSAAGGFDY

SEQ ID NO: 211 - protein, 9 aa, Homo sapiens
  Light chain CDR3 for antibody 106 (IGKV1-17)
LQHNSYPRT

SEQ ID NO: 212 - protein, 15 aa, Homo sapiens
  Heavy chain CDR3 for antibody 106 (IGHV1-69)
ARTDWDGYNFSWFDP

SEQ ID NO: 213 - protein, 11 aa, Homo sapiens
  Light chain CDR3 for antibody 107 (IGKV1-12)
QQANSFPPLFT

SEQ ID NO: 214 - protein, 10 aa, Homo sapiens
  Heavy chain CDR3 for antibody 107 (IGHV3-66)
ARDLRSYYDY

SEQ ID NO: 215 - protein, 9 aa, Homo sapiens
  Light chain CDR3 for antibody 108 (IGKV1-39)
QQSHTFPLT

SEQ ID NO: 216 - protein, 12 aa, Homo sapiens
  Heavy chain CDR3 for antibody 108 (IGHV1-46)
ARAPSDFYGLDV

SEQ ID NO: 217 - protein, 9 aa, Homo sapiens
  Light chain CDR3 for antibody 109 (IGKV1-9)
QQLNSYPQT

SEQ ID NO: 218 - protein, 12 aa, Homo sapiens
  Heavy chain CDR3 for antibody 109 (IGHV3-66)
ARDLSEAGGFDY

SEQ ID NO: 219 - protein, 9 aa, Homo sapiens
  Light chain CDR3 for antibody 110 (IGKV3-20)
QQYGSSPLT

SEQ ID NO: 220 - protein, 12 aa, Homo sapiens
  Heavy chain CDR3 for antibody 110 (IGHV4-31)
ARDYGDYEGVVA

SEQ ID NO: 221 - protein, 10 aa, Homo sapiens
  Light chain CDR3 for antibody 111 (IGKV1-9)
QQVNSYPGPT

SEQ ID NO: 222 - protein, 17 aa, Homo sapiens
  Heavy chain CDR3 for antibody 111 (IGHV1-69)
ARGLLWFGADYYYGMDV

SEQ ID NO: 223 - protein, 8 aa, Homo sapiens
  Light chain CDR3 for antibody 112 (IGKV3-11)
QQRSNWFT

SEQ ID NO: 224 - protein, 22 aa, Homo sapiens
  Heavy chain CDR3 for antibody 112 (IGHV1-46)
AREGGLRVYDSSGYDTGYAFDI

SEQ ID NO: 225 - protein, 9 aa, Homo sapiens
  Light chain CDR3 for antibody 113 (IGKV1-27)
QKYNSALWT

SEQ ID NO: 226 - protein, 14 aa, Homo sapiens
  Heavy chain CDR3 for antibody 113 (IGHV3-h)
ARIDYYDSSGYPDY

SEQ ID NO: 227 - protein, 9 aa, Homo sapiens
  Light chain CDR3 for antibody 114 (IGKV1-9)
QQLNSYPVA

SEQ ID NO: 228 - protein, 11 aa, Homo sapiens
  Heavy chain CDR3 for antibody 114 (IGHV3-66)
ARETMVYGMDV

SEQ ID NO: 229 - protein, 9 aa, Homo sapiens
  Light chain CDR3 for antibody 115 (IGKV1-33)
QQYDNLPPT

SEQ ID NO: 230 - protein, 15 aa, Homo sapiens
  Heavy chain CDR3 for antibody 115 (IGHV3-30)
AKDIYLWSSGNYFDY

SEQ ID NO: 231 - protein, 10 aa, Homo sapiens
  Light chain CDR3 for antibody 116 (IGKV3-11)
QQRSNWPRAT

SEQ ID NO: 232 - protein, 12 aa, Homo sapiens
  Heavy chain CDR3 for antibody 116 (IGHV3-66)
ARDLSAAGGFDY

SEQ ID NO: 233 - protein, 9 aa, Homo sapiens
  Light chain CDR3 for antibody 117 (IGKV1-33)
QQYDNLPLT

SEQ ID NO: 234 - protein, 18 aa, Homo sapiens
  Heavy chain CDR3 for antibody 117 (IGHV2-5)
AHYSGYSYGYPRAYGMDV

SEQ ID NO: 235 - protein, 9 aa, Homo sapiens
  Light chain CDR3 for antibody 118 (IGKV1-39)
QQFNSYPLT

SEQ ID NO: 236 - protein, 17 aa, Homo sapiens
  Heavy chain CDR3 for antibody 118 (IGHV4-34)
ARGRFLEWLGTLDAFDI

SEQ ID NO: 237 - protein, 9 aa, Homo sapiens
  Light chain CDR3 for antibody 119 (IGKV4-1)
QQYYSTPLT

SEQ ID NO: 238 - protein, 17 aa, Homo sapiens
  Heavy chain CDR3 for antibody 119 (IGHV4/OR15-8)
ARDLTDYGDHGGYWFDP

SEQ ID NO: 239 - protein, 9 aa, Homo sapiens
  Light chain CDR3 for antibody 120 (IGKV1-9)
QQLNSYPVA

SEQ ID NO: 240 - protein, 12 aa, Homo sapiens
  Heavy chain CDR3 for antibody 120 (IGHV3-66)
ARDLEEQGAFDI

SEQ ID NO: 241 - protein, 9 aa, Homo sapiens
  Light chain CDR3 for antibody 121 (IGKV1-33)
QQYDNLPIT

SEQ ID NO: 242 - protein, 16 aa, Homo sapiens
  Heavy chain CDR3 for antibody 121 (IGHV3-30)
AKPLYSYGAPQTYFDY

SEQ ID NO: 243 - protein, 9 aa, Homo sapiens
  Light chain CDR3 for antibody 122 (IGKV1-12)
QQANGFPLT

SEQ ID NO: 244 - protein, 12 aa, Homo sapiens
  Heavy chain CDR3 for antibody 122 (IGHV2-5)
GYRGGARAWFGP

SEQ ID NO: 245 - protein, 9 aa, Homo sapiens
  Light chain CDR3 for antibody 123 (IGKV1-39)
QQSYSAPLA

SEQ ID NO: 246 - protein, 8 aa, Homo sapiens
  Heavy chain CDR3 for antibody 123 (IGHV1-8)
ARGRVADY

SEQ ID NO: 247 - protein, 9 aa, Homo sapiens
  Light chain CDR3 for antibody 124 (IGKV1-12)
QQANSFPYS

SEQ ID NO: 248 - protein, 10 aa, Homo sapiens
  Heavy chain CDR3 for antibody 124 (IGHV3-66)
ARDLRSYYDY

SEQ ID NO: 249 - protein, 9 aa, Homo sapiens
  Light chain CDR3 for antibody 125 (IGKV4-1)
QQYYSTPLT

SEQ ID NO: 250 - protein, 19 aa, Homo sapiens
  Heavy chain CDR3 for antibody 125 (IGHV4-31)
ARCTTTTQWLKMVVNWFDP

SEQ ID NO: 251 - protein, 8 aa, Homo sapiens
  Light chain CDR3 for antibody 126 (IGKV3-11)
QQRSNWFT

SEQ ID NO: 252 - protein, 23 aa, Homo sapiens
  Heavy chain CDR3 for antibody 126 (IGHV1-2)
ARMPRPGWSPSWFGETDHRPLDY

SEQ ID NO: 253 - protein, 9 aa, Homo sapiens
  Light chain CDR3 for antibody 127 (IGKV1-39)
QQSYSTPHT

SEQ ID NO: 254 - protein, 12 aa, Homo sapiens
  Heavy chain CDR3 for antibody 127 (IGHV1-69)
ARDYGDYEGVVA

SEQ ID NO: 255 - protein, 10 aa, Homo sapiens
  Light chain CDR3 for antibody 128 (IGKV1-9)
QQVNSYPGPT

SEQ ID NO: 256 - protein, 16 aa, Homo sapiens
  Heavy chain CDR3 for antibody 128 (IGHV3-33)
AREVDTAMDRTILWDY

SEQ ID NO: 257 - protein, 9 aa, Homo sapiens
  Light chain CDR3 for antibody 129 (IGKV1D-12)
QQANSFPLT

SEQ ID NO: 258 - protein, 17 aa, Homo sapiens
  Heavy chain CDR3 for antibody 129 (IGHV4-59)
ARAERGWLRRPEYYFDY

SEQ ID NO: 259 - protein, 10 aa, Homo sapiens
  Light chain CDR3 for antibody 130 (IGKV1-5)
QQYNSYATIT

SEQ ID NO: 260 - protein, 21 aa, Homo sapiens
  Heavy chain CDR3 for antibody 130 (IGHV4-61)
ARESGFHDVWTQWGYNYGMDV

SEQ ID NO: 261 - protein, 10 aa, Homo sapiens
  Light chain CDR3 for antibody 131 (IGKV1-9)
QQLDTYPGPT

SEQ ID NO: 262 - protein, 10 aa, Homo sapiens
  Heavy chain CDR3 for antibody 131 (IGHV3-66)
ARDLRSYYDY

SEQ ID NO: 263 - protein, 8 aa, Homo sapiens
  Light chain CDR3 for antibody 132 (IGKV2D-28)
MQALQTPT

SEQ ID NO: 264 - protein, 17 aa, Homo sapiens
  Heavy chain CDR3 for antibody 132 (IGHV1-69)
ARHSSDGDYYYYYGMDV

SEQ ID NO: 265 - protein, 9 aa, Homo sapiens
  Light chain CDR3 for antibody 133 (IGKV5-2)
LQHDNFPYT

SEQ ID NO: 266 - protein, 15 aa, Homo sapiens
  Heavy chain CDR3 for antibody 133 (IGHV1-2)
ANIMVPKPGSTAFDI

SEQ ID NO: 267 - protein, 10 aa, Homo sapiens
  Light chain CDR3 for antibody 134 (IGKV1-9)
QQLNSYPPFT

SEQ ID NO: 268 - protein, 11 aa, Homo sapiens
  Heavy chain CDR3 for antibody 134 (IGHV3-66)
ARETMVYGMDV

SEQ ID NO: 269 - protein, 10 aa, Homo sapiens
  Light chain CDR3 for antibody 135 (IGKV3-11)
QQRSNWPPYS

SEQ ID NO: 270 - protein, 12 aa, Homo sapiens
  Heavy chain CDR3 for antibody 135 (IGHV1-69)
ARDYGDYEGVVA

SEQ ID NO: 271 - protein, 9 aa, Homo sapiens
  Light chain CDR3 for antibody 136 (IGKV3-11)
QQRSNWPLT

SEQ ID NO: 272 - protein, 23 aa, Homo sapiens
  Heavy chain CDR3 for antibody 136 (IGHV1-8)
ARGVGSYYDFWSGWDYYYYYMDV

SEQ ID NO: 273 - protein, 9 aa, Homo sapiens
  Light chain CDR3 for antibody 137 (IGKV1-5)
QRYNSFPIT

SEQ ID NO: 274 - protein, 13 aa, Homo sapiens
  Heavy chain CDR3 for antibody 137 (IGHV3-11)
AAGGSTTSWYWRS

SEQ ID NO: 275 - protein, 9 aa, Homo sapiens
  Light chain CDR3 for antibody 138 (IGKV2D-30)
MQGTHWPPT

SEQ ID NO: 276 - protein, 8 aa, Homo sapiens
  Heavy chain CDR3 for antibody 138 (IGHV3-48)
AQTITLWS

SEQ ID NO: 277 - protein, 8 aa, Homo sapiens
  Light chain CDR3 for antibody 139 (IGKV3-11)
QQRSNWFT

SEQ ID NO: 278 - protein, 17 aa, Homo sapiens
  Heavy chain CDR3 for antibody 139 (IGHV1-69)
ARHSSDGDYYYYYGMDV

SEQ ID NO: 279 - protein, 9 aa, Homo sapiens
  Light chain CDR3 for antibody 140 (IGKV1-39)
QQSYSTPPT

SEQ ID NO: 280 - protein, 17 aa, Homo sapiens
  Heavy chain CDR3 for antibody 140 (IGHV1-2)
ARAGAAGTPYYYYYMDV

SEQ ID NO: 281 - protein, 10 aa, Homo sapiens
  Light chain CDR3 for antibody 141 (IGKV1-9)
QQLNSYPGPT

SEQ ID NO: 282 - protein, 17 aa, Homo sapiens
  Heavy chain CDR3 for antibody 141 (IGHV1-2)
AREPSISRDGYSGYDDY

SEQ ID NO: 283 - protein, 8 aa, Homo sapiens
  Light chain CDR3 for antibody 142 (IGKV1-5)
QQYVTYPT

SEQ ID NO: 284 - protein, 11 aa, Homo sapiens
  Heavy chain CDR3 for antibody 142 (IGHV3-53)
ARDLGPYGMDV

SEQ ID NO: 285 - protein, 9 aa, Homo sapiens
  Light chain CDR3 for antibody 143 (IGKV4-1)
QQYYSTPPT

SEQ ID NO: 286 - protein, 23 aa, Homo sapiens
  Heavy chain CDR3 for antibody 143 (IGHV1-46)
ARDGGRDYDILTGGSYYYYYMDV

SEQ ID NO: 287 - protein, 8 aa, Homo sapiens
  Light chain CDR3 for antibody 144 (IGKV2D-28)
MQALQTPT

SEQ ID NO: 288 - protein, 23 aa, Homo sapiens
  Heavy chain CDR3 for antibody 144 (IGHV1-2)
ARMPRPGWSPSWFGETDHRPLDY

SEQ ID NO: 289 - protein, 9 aa, Homo sapiens
  Light chain CDR3 for antibody 145 (IGKV1-33)
QQYDNLPLT

SEQ ID NO: 290 - protein, 21 aa, Homo sapiens
  Heavy chain CDR3 for antibody 145 (IGHV4/OR15-8)
AREPTVYNWNDMEYYYYGMDV

SEQ ID NO: 291 - protein, 9 aa, Homo sapiens
  Light chain CDR3 for antibody 146 (IGKV1-39)
QQSYSTPPS

SEQ ID NO: 292 - protein, 20 aa, Homo sapiens
  Heavy chain CDR3 for antibody 146 (IGHV5-51)
ARLGVEQQLPPHPNYYGMDV

SEQ ID NO: 293 - protein, 9 aa, Homo sapiens
  Light chain CDR3 for antibody 147 (IGKV2D-28)
MQALQTPYT

SEQ ID NO: 294 - protein, 17 aa, Homo sapiens
  Heavy chain CDR3 for antibody 147 (IGHV1-2)
AREPSISRDGYSGYDDY

SEQ ID NO: 295 - protein, 9 aa, Homo sapiens
  Light chain CDR3 for antibody 148 (IGKV1-6)
LQDYNYPWT

SEQ ID NO: 296 - protein, 17 aa, Homo sapiens
  Heavy chain CDR3 for antibody 148 (IGHV1-69)
ARGLLWFGADYYYGMDV

SEQ ID NO: 297 - protein, 9 aa, Homo sapiens
  Light chain CDR3 for antibody 149 (IGKV1-33)
QQYGRRPLT

SEQ ID NO: 298 - protein, 17 aa, Homo sapiens
  Heavy chain CDR3 for antibody 149 (IGHV2-70)
ARTHYDILTGHEAPFDY

SEQ ID NO: 299 - protein, 9 aa, Homo sapiens
  Light chain CDR3 for antibody 150 (IGKV1-12)
QQANSFPYS

SEQ ID NO: 300 - protein, 12 aa, Homo sapiens
  Heavy chain CDR3 for antibody 150 (IGHV3-66)
ARDLEEQGAFDI

SEQ ID NO: 301 - protein, 10 aa, Homo sapiens [sequence omitted]

SEQ ID NO: 302 - protein, 10 aa, Homo sapiens
  Heavy chain CDR3 for antibody 151 (IGHV3-66)
ARDLRSYYDY

SEQ ID NO: 303 - protein, 9 aa, Homo sapiens
  Light chain CDR3 for antibody 152 (IGKV1-39)
QQSYGIPWT

SEQ ID NO: 304 - protein, 14 aa, Homo sapiens
  Heavy chain CDR3 for antibody 152 (IGHV4-61)
ARSTHQLPVAWFDP

SEQ ID NO: 305 - protein, 9 aa, Homo sapiens
  Light chain CDR3 for antibody 153 (IGKV1-39)
QQSYSTPLT

SEQ ID NO: 306 - protein, 18 aa, Homo sapiens
  Heavy chain CDR3 for antibody 153 (IGHV1-69)
ARGEWEPLSYYYYYYMDV

SEQ ID NO: 307 - protein, 9 aa, Homo sapiens
  Light chain CDR3 for antibody 154 (IGKV2D-28)
MQALQTPYT

SEQ ID NO: 308 - protein, 18 aa, Homo sapiens
  Heavy chain CDR3 for antibody 154 (IGHV2-5)
AHYSGYSYGYPRAYGMDV

SEQ ID NO: 309 - protein, 9 aa, Homo sapiens
  Light chain CDR3 for antibody 155 (IGKV1-39)
QQSYDAPYA

SEQ ID NO: 310 - protein, 17 aa, Homo sapiens
  Heavy chain CDR3 for antibody 155 (IGHV4-4)
ARDSEGLRDYYHYGMDV

SEQ ID NO: 311 - protein, 9 aa, Homo sapiens
  Light chain CDR3 for antibody 156 (IGKV3-20)
QQYGSFLLT

SEQ ID NO: 312 - protein, 23 aa, Homo sapiens
  Heavy chain CDR3 for antibody 156 (IGHV1-69)
ARESSDTGIAVAGPSYYYYYMDV

SEQ ID NO: 313 - protein, 9 aa, Homo sapiens
  Light chain CDR3 for antibody 157 (IGKV1-27)
QKYNSAPLT

SEQ ID NO: 314 - protein, 10 aa, Homo sapiens
  Heavy chain CDR3 for antibody 157 (IGHV4-31)
ARTSGSYFDS

SEQ ID NO: 315 - protein, 9 aa, Homo sapiens
  Light chain CDR3 for antibody 158 (IGKV2D-28)
MQALQTPLT

SEQ ID NO: 316 - protein, 14 aa, Homo sapiens
  Heavy chain CDR3 for antibody 158 (IGHV1-46)
ARGDWNDGWDWFDP

SEQ ID NO: 317 - protein, 10 aa, Homo sapiens
  Light chain CDR3 for antibody 159 (IGKV1-9)
QQVNSYPGPT

SEQ ID NO: 318 - protein, 11 aa, Homo sapiens
  Heavy chain CDR3 for antibody 159 (IGHV3-66)
ARWAWTPIFDY

SEQ ID NO: 319 - protein, 9 aa, Homo sapiens
  Light chain CDR3 for antibody 160 (IGKV1-39)
QQSYSTPPT

SEQ ID NO: 320 - protein, 18 aa, Homo sapiens
  Heavy chain CDR3 for antibody 160 (IGHV2-5)
AHYSGYSYGYPRAYGMDV

SEQ ID NO: 321 - protein, 9 aa, Homo sapiens
  Light chain CDR3 for antibody 161 (IGKV1-12)
QQANSFPFT

SEQ ID NO: 322 - protein, 25 aa, Homo sapiens
  Heavy chain CDR3 for antibody 161 (IGHV1-46)
ARDRSGSGSYSPLTGDSGYYYGMDV

SEQ ID NO: 323 - protein, 8 aa, Homo sapiens
  Light chain CDR3 for antibody 162 (IGKV3-11)
QQRSNWFT

SEQ ID NO: 324 - protein, 16 aa, Homo sapiens
  Heavy chain CDR3 for antibody 162 (IGHV1-18)
ARANPGAVGYYYGMDV

SEQ ID NO: 325 - protein, 9 aa, Homo sapiens
  Light chain CDR3 for antibody 163 (IGKV4-1)
QQYYSTPWT

SEQ ID NO: 326 - protein, 17 aa, Homo sapiens
  Heavy chain CDR3 for antibody 163 (IGHV1-69)
ATHHQPAVLLWFGELFG

SEQ ID NO: 327 - protein, 9 aa, Homo sapiens
  Light chain CDR3 for antibody 164 (IGKV1-12)
QQANSFPYS

SEQ ID NO: 328 - protein, 18 aa, Homo sapiens
  Heavy chain CDR3 for antibody 164 (IGHV2-5)
AHYSGYSYGYPRAYGMDV

SEQ ID NO: 329 - protein, 10 aa, Homo sapiens
  Light chain CDR3 for antibody 165 (IGKV1-33)
QQYDNLPGVT

SEQ ID NO: 330 - protein, 18 aa, Homo sapiens
  Heavy chain CDR3 for antibody 165 (IGHV2-5)
AHYSGYSYGYPRAYGMDV

SEQ ID NO: 331 - protein, 9 aa, Homo sapiens
  Light chain CDR3 for antibody 166 (IGKV1-9)
QQLNSYPVA

SEQ ID NO: 332 - protein, 17 aa, Homo sapiens
  Heavy chain CDR3 for antibody 166 (IGHV1-2)
AREPSISRDGYSGYDDY

SEQ ID NO: 333 - protein, 9 aa, Homo sapiens
  Light chain CDR3 for antibody 167 (IGKV1-9)
QQLNSYPVA

SEQ ID NO: 334 - protein, 9 aa, Homo sapiens
  Heavy chain CDR3 for antibody 167 (IGHV3-53)
ARESYGMDV

SEQ ID NO: 335 - protein, 9 aa, Homo sapiens
  Light chain CDR3 for antibody 168 (IGKV1-39)
QQSYSTPNT

SEQ ID NO: 336 - protein, 15 aa, Homo sapiens
  Heavy chain CDR3 for antibody 168 (IGHV3-30)
ANGQHYYYYYYGMDV

SEQ ID NO: 337 - protein, 9 aa, Homo sapiens
  Light chain CDR3 for antibody 169 (IGKV1-5)
QQYNSYSWT

SEQ ID NO: 338 - protein, 16 aa, Homo sapiens
  Heavy chain CDR3 for antibody 169 (IGHV1-69)
ARVEWGDFDYYYGMDV

SEQ ID NO: 339 - protein, 10 aa, Homo sapiens
  Light chain CDR3 for antibody 170 (IGKV1-39)
QQSYSTPLYS

SEQ ID NO: 340 - protein, 12 aa, Homo sapiens
  Heavy chain CDR3 for antibody 170 (IGHV1-69)
ARAPSDFYGLDV

SEQ ID NO: 341 - protein, 10 aa, Homo sapiens
  Light chain CDR3 for antibody 171 (IGKV1-9)
QQLNSYPGPT

SEQ ID NO: 342 - protein, 11 aa, Homo sapiens
  Heavy chain CDR3 for antibody 171 (IGHV3-53)
ARDLGPYGMDV

SEQ ID NO: 343 - protein, 11 aa, Homo sapiens
  Light chain CDR3 for antibody 172 (IGKV1-33)
QQYDNLPPLYS

SEQ ID NO: 344 - protein, 17 aa, Homo sapiens
  Heavy chain CDR3 for antibody 172 (IGHV4-59)
ARDLGFRALEPGGAFDI

SEQ ID NO: 345 - protein, 9 aa, Homo sapiens
  Light chain CDR3 for antibody 173 (IGKV1-33)
QQYDNLPLT

SEQ ID NO: 346 - protein, 16 aa, Homo sapiens
  Heavy chain CDR3 for antibody 173 (IGHV4-59)
ARVLGGRSGSYYYPDY

SEQ ID NO: 347 - protein, 10 aa, Homo sapiens
  Light chain CDR3 for antibody 174 (IGKV1-9)
QQVNSYPGPT

SEQ ID NO: 348 - protein, 11 aa, Homo sapiens
  Heavy chain CDR3 for antibody 174 (IGHV3-53)
ARDGRGDLWSY

SEQ ID NO: 349 - protein, 9 aa, Homo sapiens
  Light chain CDR3 for antibody 175 (IGKV1-33)
QQYDNLLLT

SEQ ID NO: 350 - protein, 13 aa, Homo sapiens
  Heavy chain CDR3 for antibody 175 (IGHV3-h)
ARTLSPYYYGMDV

SEQ ID NO: 351 - protein, 9 aa, Homo sapiens
  Light chain CDR3 for antibody 176 (IGKV1-12)
QQANSFPFT

SEQ ID NO: 352 - protein, 19 aa, Homo sapiens
  Heavy chain CDR3 for antibody 176 (IGHV4-31)
ARAPSITHFVARVVDAFDI

SEQ ID NO: 353 - protein, 10 aa, Homo sapiens
  Light chain CDR3 for antibody 177 (IGKV1-9)
QQLNSYPGPT

SEQ ID NO: 354 - protein, 22 aa, Homo sapiens
  Heavy chain CDR3 for antibody 177 (IGHV1-46)
AREGGLRVYDSSGYDTGYAFDI

SEQ ID NO: 355 - protein, 10 aa, Homo sapiens [sequence omitted]

SEQ ID NO: 356 - protein, 23 aa, Homo sapiens
  Heavy chain CDR3 for antibody 178 (IGHV1-2)
ARMPRPGWSPSWFGETDHRPLDY

SEQ ID NO: 357 - protein, 9 aa, Homo sapiens
  Light chain CDR3 for antibody 179 (IGKV1-27)
HKYNVVPWT

SEQ ID NO: 358 - protein, 8 aa, Homo sapiens
  Heavy chain CDR3 for antibody 179 (IGHV3-48)
YRGHYSDH

SEQ ID NO: 359 - protein, 10 aa, Homo sapiens
  Light chain CDR3 for antibody 180 (IGKV2-30)
MQGTHWPPPS

SEQ ID NO: 360 - protein, 16 aa, Homo sapiens
  Heavy chain CDR3 for antibody 180 (IGHV4-34)
ARGCSGGSCYPNPFDY

SEQ ID NO: 361 - protein, 9 aa, Homo sapiens
  Light chain CDR3 for antibody 181 (IGKV1-9)
QQLNSYPVA

SEQ ID NO: 362 - protein, 16 aa, Homo sapiens
  Heavy chain CDR3 for antibody 181 (IGHV3-33)
AREVDTAMDRTILWDY

SEQ ID NO: 363 - protein, 8 aa, Homo sapiens
  Light chain CDR3 for antibody 182 (IGKV2D-28)
MQALQTPT

SEQ ID NO: 364 - protein, 12 aa, Homo sapiens
  Heavy chain CDR3 for antibody 182 (IGHV3-66)
ARDLEEQGAFDI

SEQ ID NO: 365 - protein, 10 aa, Homo sapiens
  Light chain CDR3 for antibody 183 (IGKV1-9)
QQLNSYPGPT

SEQ ID NO: 366 - protein, 16 aa, Homo sapiens
  Heavy chain CDR3 for antibody 183 (IGHV4-34)
ARGCSGGSCYPNPFDY

SEQ ID NO: 367 - protein, 8 aa, Homo sapiens
  Light chain CDR3 for antibody 184 (IGKV3-11)
QQRSNWFT

SEQ ID NO: 368 - protein, 12 aa, Homo sapiens
  Heavy chain CDR3 for antibody 184 (IGHV3-66)
ARDLEEQGAFDI

SEQ ID NO: 369 - protein, 9 aa, Homo sapiens
  Light chain CDR3 for antibody 185 (IGKV1-27)
QKYNSAPWT

SEQ ID NO: 370 - protein, 19 aa, Homo sapiens
  Heavy chain CDR3 for antibody 185 (IGHV1-69)
ARAAPDYDFWSGFRNWFDP

SEQ ID NO: 371 - protein, 9 aa, Homo sapiens
  Light chain CDR3 for antibody 186 (IGKV1-9)
QQLNSYPPS

SEQ ID NO: 372 - protein, 17 aa, Homo sapiens
  Heavy chain CDR3 for antibody 186 (IGHV1-69)
ARGLLWFGADYYYGMDV

SEQ ID NO: 373 - protein, 8 aa, Homo sapiens
  Light chain CDR3 for antibody 187 (IGKV2D-28)
MQALQTPT

SEQ ID NO: 374 - protein, 10 aa, Homo sapiens
  Heavy chain CDR3 for antibody 187 (IGHV3-66)
ARDLRSYYDY

SEQ ID NO: 375 - protein, 9 aa, Homo sapiens
  Light chain CDR3 for antibody 188 (IGKV1-39)
QQSYSTPLT

SEQ ID NO: 376 - protein, 16 aa, Homo sapiens
  Heavy chain CDR3 for antibody 188 (IGHV1-69)
ARVEWGDFDYYYGMDV

SEQ ID NO: 377 - protein, 9 aa, Homo sapiens
  Light chain CDR3 for antibody 189 (IGKV3-20)
QQYGSSLYT

SEQ ID NO: 378 - protein, 17 aa, Homo sapiens
  Heavy chain CDR3 for antibody 189 (IGHV1-2)
AREPSISRDGYSGYDDY

SEQ ID NO: 379 - protein, 9 aa, Homo sapiens
  Light chain CDR3 for antibody 190 (IGKV1-12)
QQANSFPYS

SEQ ID NO: 380 - protein, 17 aa, Homo sapiens
  Heavy chain CDR3 for antibody 190 (IGHV1-2)
ARAGAAGTPYYYYYMDV

SEQ ID NO: 381 - protein, 11 aa, Homo sapiens
  Light chain CDR3 for antibody 191 (IGKV3-15)
QQYNNWPPMYT

SEQ ID NO: 382 - protein, 12 aa, Homo sapiens
  Heavy chain CDR3 for antibody 191 (IGHV3-66)
ARDLSAAGGFDY

SEQ ID NO: 383 - protein, 9 aa, Homo sapiens
  Light chain CDR3 for antibody 192 (IGKV3-20)
QQYGSSPWT

SEQ ID NO: 384 - protein, 6 aa, Homo sapiens
  Heavy chain CDR3 for antibody 192 (IGHV4-59)
ARGFDY

SEQ ID NO: 385 - protein, 10 aa, Homo sapiens
  Light chain CDR3 for antibody 193 (IGKV1-9)
QQLDTYPGPT

SEQ ID NO: 386 - protein, 18 aa, Homo sapiens
  Heavy chain CDR3 for antibody 193 (IGHV2-5)
AHYSGYSYGYPRAYGMDV

SEQ ID NO: 387 - protein, 9 aa, Homo sapiens
  Light chain CDR3 for antibody 194 (IGKV2D-28)
MQALQTPYT

SEQ ID NO: 388 - protein, 12 aa, Homo sapiens
  Heavy chain CDR3 for antibody 194 (IGHV3-66)
ARDLSAAGGFDY

SEQ ID NO: 389 - protein, 8 aa, Homo sapiens
  Light chain CDR3 for antibody 195 (IGKV3-11)
QQRSNWFT

SEQ ID NO: 390 - protein, 16 aa, Homo sapiens
  Heavy chain CDR3 for antibody 195 (IGHV3-33)
AREVDTAMDRTILWDY

SEQ ID NO: 391 - protein, 9 aa, Homo sapiens
  Light chain CDR3 for antibody 196 (IGKV1-39)
QQSYSNPWT

SEQ ID NO: 392 - protein, 11 aa, Homo sapiens
  Heavy chain CDR3 for antibody 196 (IGHV3-30)
ARDWAIHSFDY

SEQ ID NO: 393 - protein, 9 aa, Homo sapiens
  Light chain CDR3 for antibody 197 (IGKV1-5)
QQYHTSPWT

SEQ ID NO: 394 - protein, 7 aa, Homo sapiens
  Heavy chain CDR3 for antibody 197 (IGHV4-39)
ARGVPGD

SEQ ID NO: 395 - protein, 9 aa, Homo sapiens
  Light chain CDR3 for antibody 198 (IGKV3-20)
QQYGSSLYT

SEQ ID NO: 396 - protein, 17 aa, Homo sapiens
  Heavy chain CDR3 for antibody 198 (IGHV1-69)
ARGLLWFGADYYYGMDV

SEQ ID NO: 397 - protein, 9 aa, Homo sapiens
  Light chain CDR3 for antibody 199 (IGKV1-39)
QQSYSTPFT

SEQ ID NO: 398 - protein, 23 aa, Homo sapiens
  Heavy chain CDR3 for antibody 199 (IGHV1-8)
ARGVGSYYDFWSGWDYYYYYMDV

SEQ ID NO: 399 - protein, 10 aa, Homo sapiens
  Light chain CDR3 for antibody 200 (IGKV1-12)
QQSYSTPPWT

SEQ ID NO: 400 - protein, 16 aa, Homo sapiens
  Heavy chain CDR3 for antibody 200 (IGHV3-53)
AKWARGGDVDYYGMDV

SEQ ID NO: 401 - protein, 10 aa, Homo sapiens
  Light chain CDR3 for antibody 201 (IGKV1-9)
QQLNSYPGPT

SEQ ID NO: 402 - protein, 17 aa, Homo sapiens
  Heavy chain CDR3 for antibody 201 (IGHV4/OR15-8)
ARDLTDYGDHGGYWFDP

SEQ ID NO: 403 - protein, 10 aa, Homo sapiens
  Light chain CDR3 for antibody 202 (IGKV1-39)
QQSYGSPRFT

SEQ ID NO: 404 - protein, 18 aa, Homo sapiens
  Heavy chain CDR3 for antibody 202 (IGHV2/OR16-5)
ARVFLELRLFYFYYYMDV

SEQ ID NO: 405 - protein, 10 aa, Homo sapiens
  Light chain CDR3 for antibody 203 (IGKV3-11)
QQRSNWPPYS

SEQ ID NO: 406 - protein, 15 aa, Homo sapiens
  Heavy chain CDR3 for antibody 203 (IGHV1-69)
ARPRVDRTRLGAFDI

SEQ ID NO: 407 - protein, 9 aa, Homo sapiens
  Light chain CDR3 for antibody 204 (IGKV1-33)
QQYDNLPPA

SEQ ID NO: 408 - protein, 10 aa, Homo sapiens
  Heavy chain CDR3 for antibody 204 (IGHV3-30)
ARDLRSYYDY

SEQ ID NO: 409 - protein, 9 aa, Homo sapiens
  Light chain CDR3 for antibody 205 (IGKV1-9)
QQLNIDRDT

SEQ ID NO: 410 - protein, 18 aa, Homo sapiens
  Heavy chain CDR3 for antibody 205 (IGHV4-31)
ARDFQALSGSYYPFYMDV

SEQ ID NO: 411 - protein, 8 aa, Homo sapiens
  Light chain CDR3 for antibody 206 (IGKV3-11)
QQRSNWFT

SEQ ID NO: 412 - protein, 11 aa, Homo sapiens
  Heavy chain CDR3 for antibody 206 (IGHV3-53)
ARDLGPYGMDV

SEQ ID NO: 413 - protein, 10 aa, Homo sapiens
  Light chain CDR3 for antibody 207 (IGKV3-11)
QQRSNWPPYS

SEQ ID NO: 414 - protein, 17 aa, Homo sapiens
  Heavy chain CDR3 for antibody 207 (IGHV4-59)
AGSPRGWLEQQPGYFDY

SEQ ID NO: 415 - protein, 9 aa, Homo sapiens
  Light chain CDR3 for antibody 208 (IGKV1-5)
QQYNSYPWT

SEQ ID NO: 416 - protein, 23 aa, Homo sapiens
  Heavy chain CDR3 for antibody 208 (IGHV4-39)
ARVSYDFWSGSPIHYYYYYYMDV

SEQ ID NO: 417 - protein, 10 aa, Homo sapiens
  Light chain CDR3 for antibody 209 (IGKV1-9)
QQVNSYPGPT

SEQ ID NO: 418 - protein, 14 aa, Homo sapiens
  Heavy chain CDR3 for antibody 209 (IGHV3-13)
ARGGGSSWYWYFDL

SEQ ID NO: 419 - protein, 8 aa, Homo sapiens
  Light chain CDR3 for antibody 210 (IGKV2D-28)
MQALQTPT

SEQ ID NO: 420 - protein, 22 aa, Homo sapiens
  Heavy chain CDR3 for antibody 210 (IGHV1-46)
AREGGLRVYDSSGYDTGYAFDI

SEQ ID NO: 421 - protein, 9 aa, Homo sapiens
  Light chain CDR3 for antibody 211 (IGKV3-20)
QQYASSPIT

SEQ ID NO: 422 - protein, 12 aa, Homo sapiens
  Heavy chain CDR3 for antibody 211 (IGHV3-66)
ARDLSAAGGFDY

SEQ ID NO: 423 - protein, 9 aa, Homo sapiens
  Light chain CDR3 for antibody 212 (IGKV1-39)
QQSYSTPRT

SEQ ID NO: 424 - protein, 15 aa, Homo sapiens
  Heavy chain CDR3 for antibody 212 (IGHV4-59)
ARGVKGLWLFDAFDI

SEQ ID NO: 425 - protein, 10 aa, Homo sapiens
  Light chain CDR3 for antibody 213 (IGKV1-33)
QQYDNLPWRS

SEQ ID NO: 426 - protein, 12 aa, Homo sapiens
  Heavy chain CDR3 for antibody 213 (IGHV3-66)
ARDLSAAGGFDY

SEQ ID NO: 427 - protein, 9 aa, Homo sapiens
  Light chain CDR3 for antibody 214 (IGKV1-39)
QQSYSTPFT

SEQ ID NO: 428 - protein, 13 aa, Homo sapiens
  Heavy chain CDR3 for antibody 214 (IGHV1-f)
ALWFGELFRWFDP

SEQ ID NO: 429 - protein, 9 aa, Homo sapiens
  Light chain CDR3 for antibody 215 (IGKV1-9)
QQLNSYSYT

SEQ ID NO: 430 - protein, 10 aa, Homo sapiens
  Heavy chain CDR3 for antibody 215 (IGHV3-66)
ARDLRSYYDY

SEQ ID NO: 431 - protein, 10 aa, Homo sapiens
  Light chain CDR3 for antibody 216 (IGKV1-12)
QQVNSYPGPT

SEQ ID NO: 432 - protein, 20 aa, Homo sapiens
  Heavy chain CDR3 for antibody 216 (IGHV3-13)
ARVGYYYDSSGLKHYWYFDL

SEQ ID NO: 433 - protein, 11 aa, Homo sapiens
  Light chain CDR3 for antibody 217 (IGKV1-12)
QQANSFPPQFT

SEQ ID NO: 434 - protein, 11 aa, Homo sapiens
  Heavy chain CDR3 for antibody 217 (IGHV3-66)
ARETMVYGMDV

SEQ ID NO: 435 - protein, 9 aa, Homo sapiens
  Light chain CDR3 for antibody 218 (IGKV1-27)
QKYNSAPLT

SEQ ID NO: 436 - protein, 23 aa, Homo sapiens
  Heavy chain CDR3 for antibody 218 (IGHV1-2)
ARVRDYDFWSGYPDTYYYYYMDV

SEQ ID NO: 437 - protein, 9 aa, Homo sapiens
  Light chain CDR3 for antibody 219 (IGKV1-39)
QQSYSTPPT

SEQ ID NO: 438 - protein, 10 aa, Homo sapiens
  Heavy chain CDR3 for antibody 219 (IGHV3-66)
ARDLRSYYDY

SEQ ID NO: 439 - protein, 10 aa, Homo sapiens
  Light chain CDR3 for antibody 220 (IGKV1-39)
QQSYSTPPLT

SEQ ID NO: 440 - protein, 18 aa, Homo sapiens
  Heavy chain CDR3 for antibody 220 (IGHV2-5)
AHYSGYSYGYPRAYGMDV

SEQ ID NO: 441 - protein, 9 aa, Homo sapiens
  Light chain CDR3 for antibody 221 (IGKV1-6)
LQDYNYPWT

SEQ ID NO: 442 - protein, 17 aa, Homo sapiens
  Heavy chain CDR3 for antibody 221 (IGHV1-2)
AREPSISRDGYSGYDDY

SEQ ID NO: 443 - protein, 11 aa, Homo sapiens
  Light chain CDR3 for antibody 222 (IGKV1-12)
QQANSFPPLFT

SEQ ID NO: 444 - protein, 11 aa, Homo sapiens
  Heavy chain CDR3 for antibody 222 (IGHV3-53)
ARDLQVYGMDV

SEQ ID NO: 445 - protein, 10 aa, Homo sapiens [sequence omitted]

SEQ ID NO: 446 - protein, 22 aa, Homo sapiens
  Heavy chain CDR3 for antibody 223 (IGHV1-46)
AREGGLRVYDSSGYDTGYAFDI

SEQ ID NO: 447 - protein, 9 aa, Homo sapiens
  Light chain CDR3 for antibody 224 (IGKV3-20)
QQYGSSLYT

SEQ ID NO: 448 - protein, 12 aa, Homo sapiens
  Heavy chain CDR3 for antibody 224 (IGHV3-66)
ARDLSAAGGFDY

SEQ ID NO: 449 - protein, 9 aa, Homo sapiens
  Light chain CDR3 for antibody 225 (IGKV3-11)
QQRRNWPLT

SEQ ID NO: 450 - protein, 16 aa, Homo sapiens
  Heavy chain CDR3 for antibody 225 (IGHV3-23)
AKDRMTAPLHYWYFDL

SEQ ID NO: 451 - protein, 9 aa, Homo sapiens
  Light chain CDR3 for antibody 226 (IGKV3-20)
QQYRNSPWT

SEQ ID NO: 452 - protein, 12 aa, Homo sapiens
  Heavy chain CDR3 for antibody 226 (IGHV3-15)
TKVGQFGEFFDY

SEQ ID NO: 453 - protein, 10 aa, Homo sapiens
  Light chain CDR3 for antibody 227 (IGKV1-39)
QQSYSTPALT

SEQ ID NO: 454 - protein, 13 aa, Homo sapiens
  Heavy chain CDR3 for antibody 227 (IGHV4-b)
ARSPRGDFYYFDY

SEQ ID NO: 455 - protein, 9 aa, Homo sapiens
  Light chain CDR3 for antibody 228 (IGKV1-6)
LQDYNYPWT

SEQ ID NO: 456 - protein, 20 aa, Homo sapiens
  Heavy chain CDR3 for antibody 228 (IGHV2-26)
ARTTYYYDSSGYYPLNYFDY

SEQ ID NO: 457 - protein, 9 aa, Homo sapiens
  Light chain CDR3 for antibody 229 (IGKV1-13)
QQFNTYPLT

SEQ ID NO: 458 - protein, 25 aa, Homo sapiens
  Heavy chain CDR3 for antibody 229 (IGHV3-30)
AKVTPGGSGRGTGPLGYYYYYGMDV

SEQ ID NO: 459 - protein, 10 aa, Homo sapiens
  Light chain CDR3 for antibody 230 (IGKV3-11)
QQRSNWPPYS

SEQ ID NO: 460 - protein, 16 aa, Homo sapiens
  Heavy chain CDR3 for antibody 230 (IGHV1-69)
ARDHSGSYYYYYGMDV

SEQ ID NO: 461 - protein, 9 aa, Homo sapiens
  Light chain CDR3 for antibody 231 (IGKV1-12)
QQANSFPYS

SEQ ID NO: 462 - protein, 17 aa, Homo sapiens
  Heavy chain CDR3 for antibody 231 (IGHV1-69)
ARGLLWFGADYYYGMDV

SEQ ID NO: 463 - protein, 9 aa, Homo sapiens
  Light chain CDR3 for antibody 232 (IGKV1-39)
QQIYETPYT

SEQ ID NO: 464 - protein, 14 aa, Homo sapiens
  Heavy chain CDR3 for antibody 232 (IGHV1-46)
ARADFGVYYSPFDF

SEQ ID NO: 465 - protein, 9 aa, Homo sapiens
  Light chain CDR3 for antibody 233 (IGKV1-39)
QQSYSTPLT

SEQ ID NO: 466 - protein, 23 aa, Homo sapiens
  Heavy chain CDR3 for antibody 233 (IGHV1-2)
ARMPRPGWSPSWFGETDHRPLDY

SEQ ID NO: 467 - protein, 9 aa, Homo sapiens
  Light chain CDR3 for antibody 234 (IGKV3-20)
QQYDSLPIT

SEQ ID NO: 468 - protein, 15 aa, Homo sapiens
  Heavy chain CDR3 for antibody 234 (IGHV3-11)
VKGYSYGYYYYAMDV

SEQ ID NO: 469 - protein, 8 aa, Homo sapiens
  Light chain CDR3 for antibody 235 (IGKV2D-28)
MQALQTPT

SEQ ID NO: 470 - protein, 11 aa, Homo sapiens
  Heavy chain CDR3 for antibody 235 (IGHV3-66)
ARETMVYGMDV

SEQ ID NO: 471 - protein, 9 aa, Homo sapiens
  Light chain CDR3 for antibody 236 (IGKV1-39)
QQSYSTPFT

SEQ ID NO: 472 - protein, 17 aa, Homo sapiens
  Heavy chain CDR3 for antibody 236 (IGHV1-69)
ARQPWGSSSDYYYYMDV

SEQ ID NO: 473 - protein, 10 aa, Homo sapiens [sequence omitted]

SEQ ID NO: 474 - protein, 11 aa, Homo sapiens
  Heavy chain CDR3 for antibody 237 (IGHV3-53)
ARDLQPYGMDV

SEQ ID NO: 475 - protein, 9 aa, Homo sapiens
  Light chain CDR3 for antibody 238 (IGKV1-6)
LQDYNYPWT

SEQ ID NO: 476 - protein, 11 aa, Homo sapiens
  Heavy chain CDR3 for antibody 238 (IGHV3-53)
ARDLQPYGMDV

SEQ ID NO: 477 - protein, 10 aa, Homo sapiens
  Light chain CDR3 for antibody 239 (IGKV1-39)
QQSYSTPPLT

SEQ ID NO: 478 - protein, 10 aa, Homo sapiens
  Heavy chain CDR3 for antibody 239 (IGHV3-13)
ARDLRSYYDY

SEQ ID NO: 479 - protein, 9 aa, Homo sapiens
  Light chain CDR3 for antibody 240 (IGKV1-33)
QQYDNLPPT

SEQ ID NO: 480 - protein, 17 aa, Homo sapiens
  Heavy chain CDR3 for antibody 240 (IGHV1-2)
ARAGAAGTPYYYYYMDV

SEQ ID NO: 481 - protein, 9 aa, Homo sapiens
  Light chain CDR3 for antibody 241 (IGKV1-17)
LQHNSYPRT

SEQ ID NO: 482 - protein, 12 aa, Homo sapiens
  Heavy chain CDR3 for antibody 241 (IGHV3-66)
ARDLSAAGGFDY

SEQ ID NO: 483 - protein, 9 aa, Homo sapiens
  Light chain CDR3 for antibody 242 (IGKV1-39)
QQSHTFPLT

SEQ ID NO: 484 - protein, 17 aa, Homo sapiens
  Heavy chain CDR3 for antibody 242 (IGHV1-2)
ARAGAAGTPYYYYYMDV

SEQ ID NO: 485 - protein, 9 aa, Homo sapiens
  Light chain CDR3 for antibody 243 (IGKV1-9)
QQLTSYSYT

SEQ ID NO: 486 - protein, 18 aa, Homo sapiens
  Heavy chain CDR3 for antibody 243 (IGHV2-5)
AHYSGYSYGYPRAYGMDV

SEQ ID NO: 487 - protein, 10 aa, Homo sapiens
  Light chain CDR3 for antibody 244 (IGKV3-15)
QQYNNWPPLT

SEQ ID NO: 488 - protein, 17 aa, Homo sapiens
  Heavy chain CDR3 for antibody 244 (IGHV4/OR15-8)
ARDLTDYGDHGGYWFDP

SEQ ID NO: 489 - protein, 9 aa, Homo sapiens
  Light chain CDR3 for antibody 245 (IGKV1-17)
LQHNSYPWT

SEQ ID NO: 490 - protein, 11 aa, Homo sapiens
  Heavy chain CDR3 for antibody 245 (IGHV4-59)
ARGTGNPGFDS

SEQ ID NO: 491 - protein, 10 aa, Homo sapiens
  Light chain CDR3 for antibody 246 (IGKV1-39)
QQSYSTSLYT

SEQ ID NO: 492 - protein, 16 aa, Homo sapiens
  Heavy chain CDR3 for antibody 246 (IGHV3-13)
ARASYDSSGYYQHFDY

SEQ ID NO: 493 - protein, 9 aa, Homo sapiens
  Light chain CDR3 for antibody 247 (IGKV1-39)
QQSYSTPLT

SEQ ID NO: 494 - protein, 17 aa, Homo sapiens
  Heavy chain CDR3 for antibody 247 (IGHV4-59)
ARSPRGWLEQQPGYFDY

SEQ ID NO: 495 - protein, 8 aa, Homo sapiens
  Light chain CDR3 for antibody 248 (IGKV3-11)
QQRSNWFT

SEQ ID NO: 496 - protein, 9 aa, Homo sapiens
  Heavy chain CDR3 for antibody 248 (IGHV3-53)
ARESYGMDV

SEQ ID NO: 497 - protein, 10 aa, Homo sapiens
  Light chain CDR3 for antibody 249 (IGKV1-9)
QQLNSYPGPT

SEQ ID NO: 498 - protein, 18 aa, Homo sapiens
  Heavy chain CDR3 for antibody 249 (IGHV3-30)
AKDGSWYYDSSGYPVFDY

SEQ ID NO: 499 - protein, 9 aa, Homo sapiens
  Light chain CDR3 for antibody 250 (IGKV1-9)
QQLNSYPPS

SEQ ID NO: 500 - protein, 23 aa, Homo sapiens
  Heavy chain CDR3 for antibody 250 (IGHV1-46)
ARMPRPGWSPSWFGETDHRPLDY

SEQ ID NO: 501 - protein, 10 aa, Homo sapiens
  Light chain CDR3 for antibody 251 (IGKV3-11)
QQRSNWPRAT

SEQ ID NO: 502 - protein, 17 aa, Homo sapiens
  Heavy chain CDR3 for antibody 251 (IGHV1-2)
ARAGAAGTPYYYYYMDV

SEQ ID NO: 503 - protein, 9 aa, Homo sapiens
  Light chain CDR3 for antibody 252 (IGKV1-39)
QQSYSTPPT

SEQ ID NO: 504 - protein, 17 aa, Homo sapiens
  Heavy chain CDR3 for antibody 252 (IGHV1-69)
ARGLLWFGADYYYGMDV

SEQ ID NO: 505 - protein, 9 aa, Homo sapiens
  Light chain CDR3 for antibody 253 (IGKV4-1)
QQYYSTPLT

SEQ ID NO: 506 - protein, 15 aa, Homo sapiens
  Heavy chain CDR3 for antibody 253 (IGHV4-31)
ARARRMVYVIDAFDI

SEQ ID NO: 507 - protein, 10 aa, Homo sapiens
  Light chain CDR3 for antibody 254 (IGKV1-9)
QQVNSYPGPT

SEQ ID NO: 508 - protein, 23 aa, Homo sapiens
  Heavy chain CDR3 for antibody 254 (IGHV1-2)
ARMPRPGWSPSWFGETDHRPLDY

SEQ ID NO: 509 - protein, 9 aa, Homo sapiens
  Light chain CDR3 for antibody 255 (IGKV3-20)
QQYDSSPLT

SEQ ID NO: 510 - protein, 11 aa, Homo sapiens
  Heavy chain CDR3 for antibody 255 (IGHV4-31)
ARRVSGYHFDS

SEQ ID NO: 511 - protein, 9 aa, Homo sapiens
  Light chain CDR3 for antibody 256 (IGKV1-17)
LQHNSYPRT

SEQ ID NO: 512 - protein, 18 aa, Homo sapiens
  Heavy chain CDR3 for antibody 256 (IGHV2-5)
AHYSGYSYGYPRAYGMDV

SEQ ID NO: 513 - protein, 8 aa, Homo sapiens
  Light chain CDR3 for antibody 257 (IGKV3-15)
QQYNNWRT

SEQ ID NO: 514 - protein, 16 aa, Homo sapiens
  Heavy chain CDR3 for antibody 257 (IGHV2-70)
ARMPLGGFWSGGYFDY

SEQ ID NO: 515 - protein, 10 aa, Homo sapiens
  Light chain CDR3 for antibody 258 (IGKV1-9)
QQLNSYPGPT

SEQ ID NO: 516 - protein, 20 aa, Homo sapiens
  Heavy chain CDR3 for antibody 258 (IGHV2-26)
ARTTYYYDSSGYYPLNYFDY

SEQ ID NO: 517 - protein, 9 aa, Homo sapiens
  Light chain CDR3 for antibody 259 (IGKV1-39)
QQSYSTPNT

SEQ ID NO: 518 - protein, 24 aa, Homo sapiens
  Heavy chain CDR3 for antibody 259 (IGHV1-8)
ARVIPDYYDSSGSPHDYYYYGMDV

SEQ ID NO: 519 - protein, 11 aa, Homo sapiens
  Light chain CDR3 for antibody 260 (IGKV1-12)
QQANSFPPLFT

SEQ ID NO: 520 - protein, 17 aa, Homo sapiens
  Heavy chain CDR3 for antibody 260 (IGHV1-2)
ARAGAAGTPYYYYYMDV

SEQ ID NO: 521 - protein, 9 aa, Homo sapiens
  Light chain CDR3 for antibody 261 (IGKV3-20)
QQYGSSPLT

SEQ ID NO: 522 - protein, 19 aa, Homo sapiens
  Heavy chain CDR3 for antibody 261 (IGHV4-59)
ARASHSTIFGVVIIQQFDY

SEQ ID NO: 523 - protein, 9 aa, Homo sapiens
  Light chain CDR3 for antibody 262 (IGKV1-12)
QQANSFPYS

SEQ ID NO: 524 - protein, 21 aa, Homo sapiens
  Heavy chain CDR3 for antibody 262 (IGHV4/OR15-8)
ARDRGRYYDSSGYEEMYAFDI

SEQ ID NO: 525 - protein, 9 aa, Homo sapiens
  Light chain CDR3 for antibody 263 (IGKV1-39)
QQSHTFPLT

SEQ ID NO: 526 - protein, 11 aa, Homo sapiens
  Heavy chain CDR3 for antibody 263 (IGHV1-69)
ASSSLWFSLDP

SEQ ID NO: 527 - protein, 9 aa, Homo sapiens
  Light chain CDR3 for antibody 264 (IGKV1-9)
QQLNSYPVA

SEQ ID NO: 528 - protein, 14 aa, Homo sapiens
  Heavy chain CDR3 for antibody 264 (IGHV3-13)
ARGGGSSWYWYFDL

SEQ ID NO: 529 - protein, 10 aa, Homo sapiens
  Light chain CDR3 for antibody 265 (IGKV1-12)
QQLNSYPGPT

SEQ ID NO: 530 - protein, 13 aa, Homo sapiens
  Heavy chain CDR3 for antibody 265 (IGHV4-31)
ARDYGGNSAQFGY

SEQ ID NO: 531 - protein, 10 aa, Homo sapiens
  Light chain CDR3 for antibody 266 (IGKV3-NL1)
QQYGSSPSFT

SEQ ID NO: 532 - protein, 10 aa, Homo sapiens
  Heavy chain CDR3 for antibody 266 (IGHV3-66)
ARDLRSYYDY

SEQ ID NO: 533 - protein, 9 aa, Homo sapiens
  Light chain CDR3 for antibody 267 (IGKV1-9)
QQLNSYPVA

SEQ ID NO: 534 - protein, 11 aa, Homo sapiens
  Heavy chain CDR3 for antibody 267 (IGHV3-53)
ARDGRGDLWSY

SEQ ID NO: 535 - protein, 8 aa, Homo sapiens
  Light chain CDR3 for antibody 268 (IGKV3-11)
QQRSNWFT

SEQ ID NO: 536 - protein, 20 aa, Homo sapiens
  Heavy chain CDR3 for antibody 268 (IGHV1-2)
ASGTYYYDSSGYYWNDAFDI

SEQ ID NO: 537 - protein, 10 aa, Homo sapiens
  Light chain CDR3 for antibody 269 (IGKV1-12)
QQANSFPRLT

SEQ ID NO: 538 - protein, 22 aa, Homo sapiens
  Heavy chain CDR3 for antibody 269 (IGHV1-8)
ARVRSDYDYVWGSYPPEYYFDY

SEQ ID NO: 539 - protein, 9 aa, Homo sapiens
  Light chain CDR3 for antibody 270 (IGKV1-12)
QQANSFPYS

SEQ ID NO: 540 - protein, 9 aa, Homo sapiens
  Heavy chain CDR3 for antibody 270 (IGHV3-53)
ARESYGMDV

SEQ ID NO: 541 - protein, 10 aa, Homo sapiens
  Light chain CDR3 for antibody 271 (IGKV1-33)
QQYDNLPGVT

SEQ ID NO: 542 - protein, 17 aa, Homo sapiens
  Heavy chain CDR3 for antibody 271 (IGHV1-2)
ARAGAAGTPYYYYYMDV

SEQ ID NO: 543 - protein, 9 aa, Homo sapiens
  Light chain CDR3 for antibody 272 (IGKV1-33)
QQYDNLPLT

SEQ ID NO: 544 - protein, 12 aa, Homo sapiens
  Heavy chain CDR3 for antibody 272 (IGHV3-66)
ARDLEEQGAFDI

SEQ ID NO: 545 - protein, 9 aa, Homo sapiens
  Light chain CDR3 for antibody 273 (IGKV1-12)
QQANSFPFT

SEQ ID NO: 546 - protein, 13 aa, Homo sapiens
  Heavy chain CDR3 for antibody 273 (IGHV1-24)
ATVRIQLWFGFDY

SEQ ID NO: 547 - protein, 8 aa, Homo sapiens
  Light chain CDR3 for antibody 274 (IGKV3-11)
QQRSNWFT

SEQ ID NO: 548 - protein, 20 aa, Homo sapiens
  Heavy chain CDR3 for antibody 274 (IGHV2-26)
ARTTYYYDSSGYYPLNYFDY

SEQ ID NO: 549 - protein, 9 aa, Homo sapiens
  Light chain CDR3 for antibody 275 (IGKV1-39)
QQSYSTPPT

SEQ ID NO: 550 - protein, 12 aa, Homo sapiens
  Heavy chain CDR3 for antibody 275 (IGHV3-66)
ARDLEEQGAFDI

SEQ ID NO: 551 - protein, 8 aa, Homo sapiens
  Light chain CDR3 for antibody 276 (IGKV2D-28)
MQALQTPT

SEQ ID NO: 552 - protein, 19 aa, Homo sapiens
  Heavy chain CDR3 for antibody 276 (IGHV1-69)
ARAHRSSTSYRLGINWFDP

SEQ ID NO: 553 - protein, 8 aa, Homo sapiens
  Light chain CDR3 for antibody 277 (IGKV3-11)
QQRSNWFT

SEQ ID NO: 554 - protein, 11 aa, Homo sapiens
  Heavy chain CDR3 for antibody 277 (IGHV3-66)
ARETMVYGMDV

SEQ ID NO: 555 - protein, 9 aa, Homo sapiens
  Light chain CDR3 for antibody 278 (IGKV1-9)
QQLNSYPVA

SEQ ID NO: 556 - protein, 16 aa, Homo sapiens
  Heavy chain CDR3 for antibody 278 (IGHV4-34)
ARGCSGGSCYPNPFDY

SEQ ID NO: 557 - protein, 10 aa, Homo sapiens [sequence omitted]

SEQ ID NO: 558 - protein, 16 aa, Homo sapiens
  Heavy chain CDR3 for antibody 279 (IGHV1-18)
ARANPGAVGYYYGMDV

SEQ ID NO: 559 - protein, 9 aa, Homo sapiens
  Light chain CDR3 for antibody 280 (IGKV1-39)
QQSYSTPWT

SEQ ID NO: 560 - protein, 11 aa, Homo sapiens
  Heavy chain CDR3 for antibody 280 (IGHV3-53)
ARDLGPYGMDV

SEQ ID NO: 561 - protein, 8 aa, Homo sapiens
  Light chain CDR3 for antibody 281 (IGKV3-11)
QQRSNWFT

SEQ ID NO: 562 - protein, 16 aa, Homo sapiens
  Heavy chain CDR3 for antibody 281 (IGHV4-34)
ARGCSGGSCYPNPFDY

SEQ ID NO: 563 - protein, 9 aa, Homo sapiens
  Light chain CDR3 for antibody 282 (IGKV2D-30)
MQGTHWPPT

SEQ ID NO: 564 - protein, 12 aa, Homo sapiens
  Heavy chain CDR3 for antibody 282 (IGHV3-66)
ARDLSAAGGFDY

SEQ ID NO: 565 - protein, 11 aa, Homo sapiens
  Light chain CDR3 for antibody 283 (IGKV1-12)
QQANSFPPLFT

SEQ ID NO: 566 - protein, 18 aa, Homo sapiens
  Heavy chain CDR3 for antibody 283 (IGHV2-5)
AHYSGYSYGYPRAYGMDV

SEQ ID NO: 567 - protein, 10 aa, Homo sapiens
  Light chain CDR3 for antibody 284 (IGKV1-33)
QQYDNLPSLT

SEQ ID NO: 568 - protein, 12 aa, Homo sapiens
  Heavy chain CDR3 for antibody 284 (IGHV3-66)
ARDLEEQGAFDI

SEQ ID NO: 569 - protein, 8 aa, Homo sapiens
  Light chain CDR3 for antibody 285 (IGKV1-13)
QQFNSYPS

SEQ ID NO: 570 - protein, 12 aa, Homo sapiens
  Heavy chain CDR3 for antibody 285 (IGHV3-66)
ARDLSAAGGFDY

SEQ ID NO: 571 - protein, 9 aa, Homo sapiens
  Light chain CDR3 for antibody 286 (IGKV1-6)
LQDYNYPWT

SEQ ID NO: 572 - protein, 9 aa, Homo sapiens
  Heavy chain CDR3 for antibody 286 (IGHV4/OR15-8)
ARVLGAMFT

SEQ ID NO: 573 - protein, 9 aa, Homo sapiens
  Light chain CDR3 for antibody 287 (IGKV1-12)
QQANSFPYS

SEQ ID NO: 574 - protein, 11 aa, Homo sapiens
  Heavy chain CDR3 for antibody 287 (IGHV3-53)
ARDLQPYGMDV

SEQ ID NO: 575 - protein, 11 aa, Homo sapiens
  Light chain CDR3 for antibody 288 (IGKV1-12)
QQANSFPPQFT

SEQ ID NO: 576 - protein, 17 aa, Homo sapiens
  Heavy chain CDR3 for antibody 288 (IGHV1-69)
ARGLLWFGADYYYGMDV

SEQ ID NO: 577 - protein, 10 aa, Homo sapiens
  Light chain CDR3 for antibody 289 (IGKV1-9)
QQLNSYPGPT

SEQ ID NO: 578 - protein, 13 aa, Homo sapiens
  Heavy chain CDR3 for antibody 289 (IGHV4-31)
ARDYGGNANYFDY

SEQ ID NO: 579 - protein, 10 aa, Homo sapiens
  Light chain CDR3 for antibody 290 (IGKV1-9)
QQLNSYPPIT

SEQ ID NO: 580 - protein, 12 aa, Homo sapiens
  Heavy chain CDR3 for antibody 290 (IGHV3-66)
ARDLSAAGGFDY

SEQ ID NO: 581 - protein, 9 aa, Homo sapiens
  Light chain CDR3 for antibody 291 (IGKV1-5)
QHYDRYPPA

SEQ ID NO: 582 - protein, 15 aa, Homo sapiens
  Heavy chain CDR3 for antibody 291 (IGHV3/OR16-1)
ARGVYSSGRCDVFDI

SEQ ID NO: 583 - protein, 9 aa, Homo sapiens
  Light chain CDR3 for antibody 292 (IGKV1-6)
LQDYNYPWT

SEQ ID NO: 584 - protein, 9 aa, Homo sapiens
  Heavy chain CDR3 for antibody 292 (IGHV3-53)
ARESYGMDV

SEQ ID NO: 585 - protein, 9 aa, Homo sapiens
  Light chain CDR3 for antibody 293 (IGKV1-12)
QQANSFPYS

SEQ ID NO: 586 - protein, 19 aa, Homo sapiens
  Heavy chain CDR3 for antibody 293 (IGHV4-31)
ARCTTTTQWLKMVVNWFDP

SEQ ID NO: 587 - protein, 9 aa, Homo sapiens
  Light chain CDR3 for antibody 294 (IGKV2D-28)
MQALQTPYT

SEQ ID NO: 588 - protein, 12 aa, Homo sapiens
  Heavy chain CDR3 for antibody 294 (IGHV3-66)
ARDLEEQGAFDI

SEQ ID NO: 589 - protein, 9 aa, Homo sapiens
  Light chain CDR3 for antibody 295 (IGKV2-30)
MQGTHWPPG

SEQ ID NO: 590 - protein, 24 aa, Homo sapiens
  Heavy chain CDR3 for antibody 295 (IGHV1-8)
ARVIPDYYDSSGSPHDYYYYGMDV

SEQ ID NO: 591 - protein, 9 aa, Homo sapiens
  Light chain CDR3 for antibody 296 (IGKV1-6)
LQDYNYPWT

SEQ ID NO: 592 - protein, 22 aa, Homo sapiens
  Heavy chain CDR3 for antibody 296 (IGHV1-46)
AREGGLRVYDSSGYDTGYAFDI

SEQ ID NO: 593 - protein, 10 aa, Homo sapiens
  Light chain CDR3 for antibody 297 (IGKV1-9)
QQLDTYPGPT

SEQ ID NO: 594 - protein, 11 aa, Homo sapiens
  Heavy chain CDR3 for antibody 297 (IGHV3-53)
ARDLQVYGMDV

SEQ ID NO: 595 - protein, 9 aa, Homo sapiens
  Light chain CDR3 for antibody 298 (IGKV3-20)
QQYGSSPLT

SEQ ID NO: 596 - protein, 18 aa, Homo sapiens
  Heavy chain CDR3 for antibody 298 (IGHV4-34)
ARGDIVGFPYYYYYGMDV

SEQ ID NO: 597 - protein, 10 aa, Homo sapiens
  Light chain CDR3 for antibody 299 (IGKV3-11)
QQRSNWPRAT

SEQ ID NO: 598 - protein, 10 aa, Homo sapiens
  Heavy chain CDR3 for antibody 299 (IGHV3-30)
ARDLRSYYDY

SEQ ID NO: 599 - protein, 9 aa, Homo sapiens
  Light chain CDR3 for antibody 300 (IGKV1-6)
LQDYNYPWT

SEQ ID NO: 600 - protein, 12 aa, Homo sapiens
  Heavy chain CDR3 for antibody 300 (IGHV2-70)
ARGVEYYYYMDV

SEQ ID NO: 601 - protein, 8 aa, Homo sapiens
  Light chain CDR3 for antibody 301 (IGKV3-11)
QQRSNWFT

SEQ ID NO: 602 - protein, 17 aa, Homo sapiens
  Heavy chain CDR3 for antibody 301 (IGHV1-2)
ARAGAAGTRYYSYSMDV

SEQ ID NO: 603 - protein, 8 aa, Homo sapiens
  Light chain CDR3 for antibody 302 (IGKV3-11)
QQRSNWFT

SEQ ID NO: 604 - protein, 17 aa, Homo sapiens
  Heavy chain CDR3 for antibody 302 (IGHV4-59)
ARSPRGWLEQQPGYFDY

SEQ ID NO: 605 - protein, 10 aa, Homo sapiens
  Light chain CDR3 for antibody 303 (IGKV3-11)
QQRSNWPPYT

SEQ ID NO: 606 - protein, 14 aa, Homo sapiens
  Heavy chain CDR3 for antibody 303 (IGHV1-69)
ASLGDTDSFDAFDI

SEQ ID NO: 607 - protein, 10 aa, Homo sapiens
  Light chain CDR3 for antibody 304 (IGKV1-33)
QQYDNLPSLT

SEQ ID NO: 608 - protein, 10 aa, Homo sapiens
  Heavy chain CDR3 for antibody 304 (IGHV3-66)
ARDLRSYYDY

SEQ ID NO: 609 - protein, 9 aa, Homo sapiens
  Light chain CDR3 for antibody 305 (IGKV1-33)
QQYDNLPPA

SEQ ID NO: 610 - protein, 17 aa, Homo sapiens
  Heavy chain CDR3 for antibody 305 (IGHV1-2)
AREPSISRDGYSGYDDY

SEQ ID NO: 611 - protein, 11 aa, Homo sapiens
  Light chain CDR3 for antibody 306 (IGKV1-12)
QQANSFPPLFT

SEQ ID NO: 612 - protein, 17 aa, Homo sapiens
  Heavy chain CDR3 for antibody 306 (IGHV1-2)
AREPSISRDGYSGYDDY

SEQ ID NO: 613 - protein, 9 aa, Homo sapiens
  Light chain CDR3 for antibody 307 (IGKV1-33)
QQYDNLPIT

SEQ ID NO: 614 - protein, 11 aa, Homo sapiens
  Heavy chain CDR3 for antibody 307 (IGHV3-66)
ARETMVYGMDV

SEQ ID NO: 615 - protein, 9 aa, Homo sapiens
  Light chain CDR3 for antibody 308 (IGKV1-39)
QQSYSTPFT

SEQ ID NO: 616 - protein, 13 aa, Homo sapiens
  Heavy chain CDR3 for antibody 308 (IGHV4-31)
ARDYGGNSAQFGY

SEQ ID NO: 617 - protein, 8 aa, Homo sapiens
  Light chain CDR3 for antibody 309 (IGKV2D-28)
MQALQTPT

SEQ ID NO: 618 - protein, 11 aa, Homo sapiens
  Heavy chain CDR3 for antibody 309 (IGHV1-69)
ARDLGPYGMDV

SEQ ID NO: 619 - protein, 9 aa, Homo sapiens
  Light chain CDR3 for antibody 310 (IGKV2D-28)
MQALQTPYT

SEQ ID NO: 620 - protein, 22 aa, Homo sapiens
  Heavy chain CDR3 for antibody 310 (IGHV1-46)
AREGGLRVYDSSGYDTGYAFDI

SEQ ID NO: 621 - protein, 8 aa, Homo sapiens
  Light chain CDR3 for antibody 311 (IGKV3-11)
QQRSNWFT

SEQ ID NO: 622 - protein, 20 aa, Homo sapiens
  Heavy chain CDR3 for antibody 311 (IGHV3-13)
ARVGYYYDSSGLKHYWYFDL

SEQ ID NO: 623 - protein, 8 aa, Homo sapiens
  Light chain CDR3 for antibody 312 (IGKV2D-28)
MQALQTPT

SEQ ID NO: 624 - protein, 16 aa, Homo sapiens
  Heavy chain CDR3 for antibody 312 (IGHV1-18)
ARANPGAVGYYYGMDV

SEQ ID NO: 625 - protein, 11 aa, Homo sapiens
  Light chain CDR3 for antibody 313 (IGKV1-12)
QQANSFPPLFT

SEQ ID NO: 626 - protein, 9 aa, Homo sapiens
  Heavy chain CDR3 for antibody 313 (IGHV3-53)
ARESYGMDV

SEQ ID NO: 627 - protein, 9 aa, Homo sapiens
  Light chain CDR3 for antibody 314 (IGKV1-9)
QQLNSYPQA

SEQ ID NO: 628 - protein, 18 aa, Homo sapiens
  Heavy chain CDR3 for antibody 314 (IGHV3-30)
AKDGSWYYDSSGYPVFDY

SEQ ID NO: 629 - protein, 8 aa, Homo sapiens
  Light chain CDR3 for antibody 315 (IGKV3-11)
QQRSNWFT

SEQ ID NO: 630 - protein, 17 aa, Homo sapiens
  Heavy chain CDR3 for antibody 315 (IGHV1-2)
ARAGAAGTPYCDYYMDV

SEQ ID NO: 631 - protein, 10 aa, Homo sapiens
  Light chain CDR3 for antibody 316 (IGKV1-9)
QQLNSYPGPT

SEQ ID NO: 632 - protein, 12 aa, Homo sapiens
  Heavy chain CDR3 for antibody 316 (IGHV3-66)
TRDLSEAGDFDY

SEQ ID NO: 633 - protein, 9 aa, Homo sapiens
  Light chain CDR3 for antibody 317 (IGKV1-9)
QQLNSYSYT

SEQ ID NO: 634 - protein, 12 aa, Homo sapiens
  Heavy chain CDR3 for antibody 317 (IGHV3-53)
ARDLEEQGAFDI

SEQ ID NO: 635 - protein, 9 aa, Homo sapiens
  Light chain CDR3 for antibody 318 (IGKV1-39)
QQSYSTPPT

SEQ ID NO: 636 - protein, 17 aa, Homo sapiens
  Heavy chain CDR3 for antibody 318 (IGHV1-2)
AREPSISRDGYSGYDDY

SEQ ID NO: 637 - protein, 8 aa, Homo sapiens
  Light chain CDR3 for antibody 319 (IGKV2D-28)
MQALQTPT

SEQ ID NO: 638 - protein, 17 aa, Homo sapiens
  Heavy chain CDR3 for antibody 319 (IGHV4-59)
ARSPRGWLEQQPGYFDY

SEQ ID NO: 639 - protein, 9 aa, Homo sapiens
  Light chain CDR3 for antibody 320 (IGKV1-6)
LQDYNYPWT

SEQ ID NO: 640 - protein, 18 aa, Homo sapiens
  Heavy chain CDR3 for antibody 320 (IGHV2-5)
APYSGYSYGCPRAYGMDV

SEQ ID NO: 641 - protein, 10 aa, Homo sapiens
  Light chain CDR3 for antibody 321 (IGKV3-20)
QHYGSAPPWT

SEQ ID NO: 642 - protein, 12 aa, Homo sapiens
  Heavy chain CDR3 for antibody 321 (IGHV2-70)
ARNSGGYFHVDH

SEQ ID NO: 643 - protein, 10 aa, Homo sapiens
  Light chain CDR3 for antibody 322 (IGKV1-39)
QQSYSTPPLT

SEQ ID NO: 644 - protein, 12 aa, Homo sapiens
  Heavy chain CDR3 for antibody 322 (IGHV3-13)
ARDLEEQGAFDI

SEQ ID NO: 645 - protein, 9 aa, Homo sapiens
  Light chain CDR3 for antibody 323 (IGKV1-9)
QQLTSYSYT

SEQ ID NO: 646 - protein, 11 aa, Homo sapiens
  Heavy chain CDR3 for antibody 323 (IGHV3-53)
ARDLQVYGMDV

SEQ ID NO: 647 - protein, 9 aa, Homo sapiens
  Light chain CDR3 for antibody 324 (IGKV3-20)
QQYGSSLYT

SEQ ID NO: 648 - protein, 23 aa, Homo sapiens
  Heavy chain CDR3 for antibody 324 (IGHV1-2)
ARMPRPGWSPSWFGETDHRPLDY

SEQ ID NO: 649 - protein, 8 aa, Homo sapiens
  Light chain CDR3 for antibody 325 (IGKV2D-28)
MQALQTPT

SEQ ID NO: 650 - protein, 16 aa, Homo sapiens
  Heavy chain CDR3 for antibody 325 (IGHV4-34)
ARGCSGGSCYPNPFDY

SEQ ID NO: 651 - protein, 9 aa, Homo sapiens
  Light chain CDR3 for antibody 326 (IGKV1-39)
QQSYSTPPT

SEQ ID NO: 652 - protein, 11 aa, Homo sapiens
  Heavy chain CDR3 for antibody 326 (IGHV3-33)
ARDLQVYGMDV

SEQ ID NO: 653 - protein, 9 aa, Homo sapiens
  Light chain CDR3 for antibody 327 (IGKV1-9)
QQLNSYPVA

SEQ ID NO: 654 - protein, 11 aa, Homo sapiens
  Heavy chain CDR3 for antibody 327 (IGHV3-66)
ARWAWTPIFDY

SEQ ID NO: 655 - protein, 10 aa, Homo sapiens
  Light chain CDR3 for antibody 328 (IGKV1-9)
QQLDTYPGPT

SEQ ID NO: 656 - protein, 17 aa, Homo sapiens
  Heavy chain CDR3 for antibody 328 (IGHV1-2)
ARAGAAGTPYYYYYMDV

SEQ ID NO: 657 - protein, 9 aa, Homo sapiens
  Light chain CDR3 for antibody 329 (IGKV1-9)
QQLNSYSYT

SEQ ID NO: 658 - protein, 16 aa, Homo sapiens
  Heavy chain CDR3 for antibody 329 (IGHV1-18)
ARANPGAVGYYYGMDV

SEQ ID NO: 659 - protein, 9 aa, Homo sapiens
  Light chain CDR3 for antibody 330 (IGKV1-9)
QQLNSYPVA

SEQ ID NO: 660 - protein, 17 aa, Homo sapiens
  Heavy chain CDR3 for antibody 330 (IGHV1-69)
ARHSSDGDYYYYYGMDV

SEQ ID NO: 661 - protein, 10 aa, Homo sapiens
  Light chain CDR3 for antibody 331 (IGKV1-9)
QQLNSYPGPT

SEQ ID NO: 662 - protein, 12 aa, Homo sapiens
  Heavy chain CDR3 for antibody 331 (IGHV3-66)
TRDLSAAGGFDY

SEQ ID NO: 663 - protein, 10 aa, Homo sapiens
  Light chain CDR3 for antibody 332 (IGKV1-9)
QQVNSYPGPT

SEQ ID NO: 664 - protein, 17 aa, Homo sapiens
  Heavy chain CDR3 for antibody 332 (IGHV4-59)
ARSPRGWLEQQPGYFDY

SEQ ID NO: 665 - protein, 8 aa, Homo sapiens
  Light chain CDR3 for antibody 333 (IGKV3-11)
QQRSNWFT

SEQ ID NO: 666 - protein, 17 aa, Homo sapiens
  Heavy chain CDR3 for antibody 333 (IGHV1-2)
ARAGAAGTPCYCYYMDV

SEQ ID NO: 667 - protein, 8 aa, Homo sapiens
  Light chain CDR3 for antibody 334 (IGKV3-11)
QQRSNWFT

SEQ ID NO: 668 - protein, 13 aa, Homo sapiens
  Heavy chain CDR3 for antibody 334 (IGHV4-31)
ARDYGGNANYFDY

SEQ ID NO: 669 - protein, 9 aa, Homo sapiens
  Light chain CDR3 for antibody 335 (IGKV1-39)
QQSYSTPVT

SEQ ID NO: 670 - protein, 14 aa, Homo sapiens
  Heavy chain CDR3 for antibody 335 (IGHV1-24)
ATEYAVAGSWKFDY

SEQ ID NO: 671 - protein, 11 aa, Homo sapiens
  Light chain CDR3 for antibody 336 (IGKV1-12)
QQANSFPPLFT

SEQ ID NO: 672 - protein, 16 aa, Homo sapiens
  Heavy chain CDR3 for antibody 336 (IGHV3-33)
AREVDTAMDRTILWDY

SEQ ID NO: 673 - protein, 9 aa, Homo sapiens
  Light chain CDR3 for antibody 337 (IGKV1-6)
LQDYNYPWT

SEQ ID NO: 674 - protein, 17 aa, Homo sapiens
  Heavy chain CDR3 for antibody 337 (IGHV4-59)
ARSPRGWLEQQPGYFDY

SEQ ID NO: 675 - protein, 10 aa, Homo sapiens
  Light chain CDR3 for antibody 338 (IGKV1-9)
QQLNSYPGPT

SEQ ID NO: 676 - protein, 14 aa, Homo sapiens
  Heavy chain CDR3 for antibody 338 (IGHV3-23)
AKALAAAGYDAFDI

SEQ ID NO: 677 - protein, 9 aa, Homo sapiens
  Light chain CDR3 for antibody 339 (IGKV1-9)
QQLNSYSYT

SEQ ID NO: 678 - protein, 17 aa, Homo sapiens
  Heavy chain CDR3 for antibody 339 (IGHV4-59)
ARSPRGWLEQQPGYFDY

SEQ ID NO: 679 - protein, 9 aa, Homo sapiens
  Light chain CDR3 for antibody 340 (IGKV1-6)
LQDYNYPWT

SEQ ID NO: 680 - protein, 18 aa, Homo sapiens
  Heavy chain CDR3 for antibody 340 (IGHV2-26)
ADYRGYSDGYPRAYGMDV

SEQ ID NO: 681 - protein, 10 aa, Homo sapiens
  Light chain CDR3 for antibody 341 (IGKV3-20)
QQYGSSPPYT

SEQ ID NO: 682 - protein, 12 aa, Homo sapiens
  Heavy chain CDR3 for antibody 341 (IGHV3-66)
ARDLEEQGAFDI

SEQ ID NO: 683 - protein, 10 aa, Homo sapiens
  Light chain CDR3 for antibody 342 (IGKV3-11)
QQRSNWPRAT

SEQ ID NO: 684 - protein, 11 aa, Homo sapiens
  Heavy chain CDR3 for antibody 342 (IGHV3-53)
ARDLQVYGMDV

SEQ ID NO: 685 - protein, 10 aa, Homo sapiens
  Light chain CDR3 for antibody 343 (IGKV1-33)
QQYDNLPSLT

SEQ ID NO: 686 - protein, 11 aa, Homo sapiens
  Heavy chain CDR3 for antibody 343 (IGHV3-66)
ARDLQVYGMDV

SEQ ID NO: 687 - protein, 10 aa, Homo sapiens
  Light chain CDR3 for antibody 344 (IGKV4-1)
QQYYSTPLYT

SEQ ID NO: 688 - protein, 17 aa, Homo sapiens
  Heavy chain CDR3 for antibody 344 (IGHV1-2)
ARAGAAGTPYYYYYMDV

SEQ ID NO: 689 - protein, 8 aa, Homo sapiens
  Light chain CDR3 for antibody 345 (IGKV3-11)
QQRSNWFT

SEQ ID NO: 690 - protein, 18 aa, Homo sapiens
  Heavy chain CDR3 for antibody 345 (IGHV1-2)
AKDGSWYYDSSGYPVFDY

SEQ ID NO: 691 - protein, 10 aa, Homo sapiens [sequence omitted]

SEQ ID NO: 692 - protein, 16 aa, Homo sapiens
  Heavy chain CDR3 for antibody 346 (IGHV4-34)
ARGCSGGSCYPNPFDY

SEQ ID NO: 693 - protein, 8 aa, Homo sapiens
  Light chain CDR3 for antibody 347 (IGKV3-20)
QQYGSSPT

SEQ ID NO: 694 - protein, 24 aa, Homo sapiens
  Heavy chain CDR3 for antibody 347 (IGHV1-46)
AGPITMVRGVIIPDYYYYYYGMDV

SEQ ID NO: 695 - protein, 9 aa, Homo sapiens
  Light chain CDR3 for antibody 348 (IGKV1-6)
LQDYNYPWT

SEQ ID NO: 696 - protein, 12 aa, Homo sapiens
  Heavy chain CDR3 for antibody 348 (IGHV3-66)
ARDLEEQGAFDI

SEQ ID NO: 697 - protein, 9 aa, Homo sapiens
  Light chain CDR3 for antibody 349 (IGKV1-12)
QQANSFPLT

SEQ ID NO: 698 - protein, 17 aa, Homo sapiens
  Heavy chain CDR3 for antibody 349 (IGHV4-31)
ARTSENILRFLEGEFDP

SEQ ID NO: 699 - protein, 9 aa, Homo sapiens
  Light chain CDR3 for antibody 350 (IGKV1-39)
QQSYSTPPT

SEQ ID NO: 700 - protein, 9 aa, Homo sapiens
  Heavy chain CDR3 for antibody 350 (IGHV3-53)
ARESYGMDV

SEQ ID NO: 701 - protein, 10 aa, Homo sapiens
  Light chain CDR3 for antibody 351 (IGKV1-9)
HQLSSYPGPT

SEQ ID NO: 702 - protein, 12 aa, Homo sapiens
  Heavy chain CDR3 for antibody 351 (IGHV3-66)
ARDLSEAGGFDY

SEQ ID NO: 703 - protein, 9 aa, Homo sapiens
  Light chain CDR3 for antibody 352 (IGKV2D-28)
MQALQTPYT

SEQ ID NO: 704 - protein, 17 aa, Homo sapiens
  Heavy chain CDR3 for antibody 352 (IGHV1-69)
ARHSSDGDYYYYYGMDV

SEQ ID NO: 705 - protein, 8 aa, Homo sapiens
  Light chain CDR3 for antibody 353 (IGKV2D-28)
MQALQTPT

SEQ ID NO: 706 - protein, 17 aa, Homo sapiens
  Heavy chain CDR3 for antibody 353 (IGHV4/OR15-8)
ARDLTDYGDHGGYWFDP

SEQ ID NO: 707 - protein, 9 aa, Homo sapiens
  Light chain CDR3 for antibody 354 (IGKV1-6)
LQDYNYPWT

SEQ ID NO: 708 - protein, 17 aa, Homo sapiens
  Heavy chain CDR3 for antibody 354 (IGHV4/OR15-8)
ARDLTDYGDHGGYWFDP

SEQ ID NO: 709 - protein, 9 aa, Homo sapiens
  Light chain CDR3 for antibody 355 (IGKV1-13)
QQANGFPYT

SEQ ID NO: 710 - protein, 20 aa, Homo sapiens
  Heavy chain CDR3 for antibody 355 (IGHV1-2)
ARGGQIEDVWGSYREYYFDY

SEQ ID NO: 711 - protein, 9 aa, Homo sapiens
  Light chain CDR3 for antibody 356 (IGKV1-39)
QRTDSVPHS

SEQ ID NO: 712 - protein, 12 aa, Homo sapiens
  Heavy chain CDR3 for antibody 356 (IGHV3-66)
ARDLSAAGGFDY

SEQ ID NO: 713 - protein, 10 aa, Homo sapiens
  Light chain CDR3 for antibody 357 (IGKV1-9)
QQVNSYPGPT

SEQ ID NO: 714 - protein, 16 aa, Homo sapiens
  Heavy chain CDR3 for antibody 357 (IGHV3-53)
ARANPGAVGYYYGMDV

SEQ ID NO: 715 - protein, 10 aa, Homo sapiens
  Light chain CDR3 for antibody 358 (IGKV1-9)
QQVNSYPGPT

SEQ ID NO: 716 - protein, 11 aa, Homo sapiens
  Heavy chain CDR3 for antibody 358 (IGHV4-31)
ARWSSSGSFDY

SEQ ID NO: 717 - protein, 11 aa, Homo sapiens
  Light chain CDR3 for antibody 359 (IGKV3-15)
QQYNNWPPMYT

SEQ ID NO: 718 - protein, 10 aa, Homo sapiens
  Heavy chain CDR3 for antibody 359 (IGHV3-66)
ARDLRSYYDY

SEQ ID NO: 719 - protein, 10 aa, Homo sapiens [sequence omitted]

SEQ ID NO: 720 - protein, 16 aa, Homo sapiens
  Heavy chain CDR3 for antibody 360 (IGHV4-61)
ARDGSYSSSWKNWFDP

SEQ ID NO: 721 - protein, 10 aa, Homo sapiens
  Light chain CDR3 for antibody 361 (IGKV1-9)
QQVNSYPGPT

SEQ ID NO: 722 - protein, 12 aa, Homo sapiens
  Heavy chain CDR3 for antibody 361 (IGHV3-53)
ARDLGSVGATDY

SEQ ID NO: 723 - protein, 9 aa, Homo sapiens
  Light chain CDR3 for antibody 362 (IGKV1-6)
LQDYNYPWT

SEQ ID NO: 724 - protein, 18 aa, Homo sapiens
  Heavy chain CDR3 for antibody 362 (IGHV2-5)
ADYSGYSYGYQGAYGMDV

SEQ ID NO: 725 - protein, 9 aa, Homo sapiens
  Light chain CDR3 for antibody 363 (IGKV1-9)
QQLNSYSYT

SEQ ID NO: 726 - protein, 17 aa, Homo sapiens
  Heavy chain CDR3 for antibody 363 (IGHV1-2)
ARAGAAGTPYYYYYMDV

SEQ ID NO: 727 - protein, 9 aa, Homo sapiens
  Light chain CDR3 for antibody 364 (IGKV1-33)
QQYDNLPYS

SEQ ID NO: 728 - protein, 17 aa, Homo sapiens
  Heavy chain CDR3 for antibody 364 (IGHV1-3)
ATEYCSGGSCYWSAFDY

SEQ ID NO: 729 - protein, 9 aa, Homo sapiens
  Light chain CDR3 for antibody 365 (IGKV3-20)
QQYGSSLYT

SEQ ID NO: 730 - protein, 10 aa, Homo sapiens
  Heavy chain CDR3 for antibody 365 (IGHV3-66)
ARDLRSYYDY

SEQ ID NO: 731 - protein, 8 aa, Homo sapiens
  Light chain CDR3 for antibody 366 (IGKV3-11)
QQRSNWFT

SEQ ID NO: 732 - protein, 17 aa, Homo sapiens
  Heavy chain CDR3 for antibody 366 (IGHV1-69)
ARQPWGSSSDYYYYMDV

SEQ ID NO: 733 - protein, 9 aa, Homo sapiens
  Light chain CDR3 for antibody 367 (IGKV1-27)
QKYNSAPWT

SEQ ID NO: 734 - protein, 18 aa, Homo sapiens
  Heavy chain CDR3 for antibody 367 (IGHV2-70)
AHYSGYSYGYPRAYGMDV

SEQ ID NO: 735 - protein, 9 aa, Homo sapiens
  Light chain CDR3 for antibody 368 (IGKV1-39)
QQSHTFPLT

SEQ ID NO: 736 - protein, 10 aa, Homo sapiens
  Heavy chain CDR3 for antibody 368 (IGHV3-66)
ARDLRSYYDY

SEQ ID NO: 737 - protein, 10 aa, Homo sapiens
  Light chain CDR3 for antibody 369 (IGKV3-11)
QQRSNWPRAT

SEQ ID NO: 738 - protein, 12 aa, Homo sapiens
  Heavy chain CDR3 for antibody 369 (IGHV3-66)
ARDLEEQGAFDI

SEQ ID NO: 739 - protein, 9 aa, Homo sapiens
  Light chain CDR3 for antibody 370 (IGKV1-6)
LQDYNYPWT

SEQ ID NO: 740 - protein, 16 aa, Homo sapiens
  Heavy chain CDR3 for antibody 370 (IGHV3-33)
AREVDTAMDRTILWDY

SEQ ID NO: 741 - protein, 10 aa, Homo sapiens
  Light chain CDR3 for antibody 371 (IGKV1-9)
QQVNSYPGPT

SEQ ID NO: 742 - protein, 11 aa, Homo sapiens
  Heavy chain CDR3 for antibody 371 (IGHV3-53)
ARDKWEGAFDI

SEQ ID NO: 743 - protein, 10 aa, Homo sapiens
  Light chain CDR3 for antibody 372 (IGKV3-20)
QQYGSSPPYT

SEQ ID NO: 744 - protein, 17 aa, Homo sapiens
  Heavy chain CDR3 for antibody 372 (IGHV1-2)
ARAGAAGTPYYYYYMDV

SEQ ID NO: 745 - protein, 9 aa, Homo sapiens
  Light chain CDR3 for antibody 373 (IGKV1-33)
QQYDNLPLT

SEQ ID NO: 746 - protein, 16 aa, Homo sapiens
  Heavy chain CDR3 for antibody 373 (IGHV4-34)
ARGCSGGSCYPNPFDY

SEQ ID NO: 747 - protein, 10 aa, Homo sapiens
  Light chain CDR3 for antibody 374 (IGKV1-33)
QQYDNLPWRS

SEQ ID NO: 748 - protein, 10 aa, Homo sapiens
  Heavy chain CDR3 for antibody 374 (IGHV3-66)
ARDLRSYYDY

SEQ ID NO: 749 - protein, 10 aa, Homo sapiens
  Light chain CDR3 for antibody 375 (IGKV1-9)
QQVNSYPGPT

SEQ ID NO: 750 - protein, 19 aa, Homo sapiens
  Heavy chain CDR3 for antibody 375 (IGHV1-69)
ARAHRSSTSYRLGINWFDP

SEQ ID NO: 751 - protein, 9 aa, Homo sapiens
  Light chain CDR3 for antibody 376 (IGKV1-33)
QQYDNLPPT

SEQ ID NO: 752 - protein, 16 aa, Homo sapiens
  Heavy chain CDR3 for antibody 376 (IGHV3-33)
AREVDTAMDRTILWDY

SEQ ID NO: 753 - protein, 8 aa, Homo sapiens
  Light chain CDR3 for antibody 377 (IGKV3-11)
QQRSNWFT

SEQ ID NO: 754 - protein, 19 aa, Homo sapiens
  Heavy chain CDR3 for antibody 377 (IGHV1-69)
ARAHRSSASYRLGINWFDP

SEQ ID NO: 755 - protein, 8 aa, Homo sapiens
  Light chain CDR3 for antibody 378 (IGKV1-33)
QQYDNLPS

SEQ ID NO: 756 - protein, 18 aa, Homo sapiens
  Heavy chain CDR3 for antibody 378 (IGHV1-69)
ARGAGIVGAIGRHSFFNY

SEQ ID NO: 757 - protein, 10 aa, Homo sapiens
  Light chain CDR3 for antibody 379 (IGKV1-9)
QQLNSYPGPT

SEQ ID NO: 758 - protein, 9 aa, Homo sapiens
  Heavy chain CDR3 for antibody 379 (IGHV4-30-2)
TRGGHYTDP

SEQ ID NO: 759 - protein, 8 aa, Homo sapiens
  Light chain CDR3 for antibody 380 (IGKV3-11)
QQRSNWFT

SEQ ID NO: 760 - protein, 17 aa, Homo sapiens
  Heavy chain CDR3 for antibody 380 (IGHV1-2)
ARAGAAGTADYYYYMED

SEQ ID NO: 761 - protein, 10 aa, Homo sapiens [sequence omitted]

SEQ ID NO: 762 - protein, 13 aa, Homo sapiens
  Heavy chain CDR3 for antibody 381 (IGHV4-31)
ARDYGGNSAQSGY

SEQ ID NO: 763 - protein, 9 aa, Homo sapiens
  Light chain CDR3 for antibody 382 (IGKV1-12)
QQANSFPPT

SEQ ID NO: 764 - protein, 22 aa, Homo sapiens
  Heavy chain CDR3 for antibody 382 (IGHV1-46)
AREGGLRVYDSSGYDTGYAFDI

SEQ ID NO: 765 - protein, 9 aa, Homo sapiens
  Light chain CDR3 for antibody 383 (IGKV1-6)
LQDYNYPWT

SEQ ID NO: 766 - protein, 18 aa, Homo sapiens
  Heavy chain CDR3 for antibody 383 (IGHV2-26)
AHYSGYSYGFPRSYGMDA

SEQ ID NO: 767 - protein, 8 aa, Homo sapiens
  Light chain CDR3 for antibody 384 (IGKV2D-28)
MQALQTPT

SEQ ID NO: 768 - protein, 16 aa, Homo sapiens
  Heavy chain CDR3 for antibody 384 (IGHV3-33)
AREVDTAMDRTIRWDY

SEQ ID NO: 769 - protein, 10 aa, Homo sapiens
  Light chain CDR3 for antibody 385 (IGKV3D-15)
QQYNNLPPWT

SEQ ID NO: 770 - protein, 17 aa, Homo sapiens
  Heavy chain CDR3 for antibody 385 (IGHV1-2)
ARETAISRDGYSGYDDY

SEQ ID NO: 771 - protein, 9 aa, Homo sapiens
  Light chain CDR3 for antibody 386 (IGKV1-6)
LQDYNYPWT

SEQ ID NO: 772 - protein, 18 aa, Homo sapiens
  Heavy chain CDR3 for antibody 386 (IGHV2-5)
AHYSGYSYGYQRSYGMGV

SEQ ID NO: 773 - protein, 10 aa, Homo sapiens
  Light chain CDR3 for antibody 387 (IGKV2-30)
MQGTHWPPPS

SEQ ID NO: 774 - protein, 12 aa, Homo sapiens
  Heavy chain CDR3 for antibody 387 (IGHV3-66)
ARDLSAAGGFDY

SEQ ID NO: 775 - protein, 10 aa, Homo sapiens
  Light chain CDR3 for antibody 388 (IGKV1-39)
QQSYGSPRFT

SEQ ID NO: 776 - protein, 18 aa, Homo sapiens
  Heavy chain CDR3 for antibody 388 (IGHV2-5)
AHYSGYSYGYPRAYGMDV

SEQ ID NO: 777 - protein, 8 aa, Homo sapiens
  Light chain CDR3 for antibody 389 (IGKV3-11)
QQRSNWFT

SEQ ID NO: 778 - protein, 17 aa, Homo sapiens
  Heavy chain CDR3 for antibody 389 (IGHV1-2)
ARAVADCTPYHYYCMDV

SEQ ID NO: 779 - protein, 9 aa, Homo sapiens
  Light chain CDR3 for antibody 390 (IGKV3-20)
QQYASSPIT

SEQ ID NO: 780 - protein, 11 aa, Homo sapiens
  Heavy chain CDR3 for antibody 390 (IGHV3-53)
ARDLQVYGMDV

SEQ ID NO: 781 - protein, 10 aa, Homo sapiens
  Light chain CDR3 for antibody 391 (IGKV1-9)
QQVNSYPAPT

SEQ ID NO: 782 - protein, 12 aa, Homo sapiens
  Heavy chain CDR3 for antibody 391 (IGHV3-66)
ARELSAAGGFDY

SEQ ID NO: 783 - protein, 10 aa, Homo sapiens
  Light chain CDR3 for antibody 392 (IGKV1-33)
QQYDNLPPLT

SEQ ID NO: 784 - protein, 11 aa, Homo sapiens
  Heavy chain CDR3 for antibody 392 (IGHV6-1)
ARETMVYGMDV

SEQ ID NO: 785 - protein, 10 aa, Homo sapiens [sequence omitted]

SEQ ID NO: 786 - protein, 17 aa, Homo sapiens
  Heavy chain CDR3 for antibody 393 (IGHV1-69)
ARGAEGIVVERGQPFDF

SEQ ID NO: 787 - protein, 10 aa, Homo sapiens
  Light chain CDR3 for antibody 394 (IGKV3-NL1)
QQYGSSPPYT

SEQ ID NO: 788 - protein, 17 aa, Homo sapiens
  Heavy chain CDR3 for antibody 394 (IGHV1-2)
AREPSISRDGYSGYDDY

SEQ ID NO: 789 - protein, 9 aa, Homo sapiens
  Light chain CDR3 for antibody 395 (IGKV1-17)
LQHNSYPRT

SEQ ID NO: 790 - protein, 10 aa, Homo sapiens
  Heavy chain CDR3 for antibody 395 (IGHV3-66)
ARDLRSYYDY

SEQ ID NO: 791 - protein, 8 aa, Homo sapiens
  Light chain CDR3 for antibody 396 (IGKV3-11)
QQRSNWFT

SEQ ID NO: 792 - protein, 14 aa, Homo sapiens
  Heavy chain CDR3 for antibody 396 (IGHV3-h)
ARIDYYDSSGYPDY

SEQ ID NO: 793 - protein, 7 aa, Homo sapiens
  Light chain CDR3 for antibody 397 (IGKV1D-12)
QQANSFT

SEQ ID NO: 794 - protein, 12 aa, Homo sapiens
  Heavy chain CDR3 for antibody 397 (IGHV3-66)
ARDLEEQGAFDI

SEQ ID NO: 795 - protein, 11 aa, Homo sapiens
  Light chain CDR3 for antibody 398 (IGKV1-33)
QQYDNLPPLYS

SEQ ID NO: 796 - protein, 12 aa, Homo sapiens
  Heavy chain CDR3 for antibody 398 (IGHV3-53)
ARDLSAAGGFDY

SEQ ID NO: 797 - protein, 10 aa, Homo sapiens
  Light chain CDR3 for antibody 399 (IGKV1-9)
QQLNSYPGPT

SEQ ID NO: 798 - protein, 17 aa, Homo sapiens
  Heavy chain CDR3 for antibody 399 (IGHV3-66)
ARDVYCSSTSCTDAFDI

SEQ ID NO: 799 - protein, 9 aa, Homo sapiens
  Light chain CDR3 for antibody 400 (IGKV1-6)
LQDYNYPWT

SEQ ID NO: 800 - protein, 18 aa, Homo sapiens
  Heavy chain CDR3 for antibody 400 (IGHV2-70)
AHDSGYSYCYPRAYGMDV

SEQ ID NO: 801 - protein, 9 aa, Homo sapiens
  Light chain CDR3 for antibody 401 (IGKV1-6)
LQDYNYPWT

SEQ ID NO: 802 - protein, 18 aa, Homo sapiens
  Heavy chain CDR3 for antibody 401 (IGHV2-5)
ARYSGYSDGYPRAYGMDV

SEQ ID NO: 803 - protein, 10 aa, Homo sapiens
  Light chain CDR3 for antibody 402 (IGKV3-11)
QQRSNWPPFT

SEQ ID NO: 804 - protein, 14 aa, Homo sapiens
  Heavy chain CDR3 for antibody 402 (IGHV5-a)
AIWRGIFYYYGMDV

SEQ ID NO: 805 - protein, 9 aa, Homo sapiens
  Light chain CDR3 for antibody 403 (IGKV3-20)
QQYGSSLYT

SEQ ID NO: 806 - protein, 22 aa, Homo sapiens
  Heavy chain CDR3 for antibody 403 (IGHV1-46)
AREGGIRVYDSSGYDTGYAFDI

SEQ ID NO: 807 - protein, 9 aa, Homo sapiens
  Light chain CDR3 for antibody 404 (IGKV3-20)
QQYDSSPIT

SEQ ID NO: 808 - protein, 10 aa, Homo sapiens
  Heavy chain CDR3 for antibody 404 (IGHV3-21)
ARDLRSYYDY

SEQ ID NO: 809 - protein, 10 aa, Homo sapiens [sequence omitted]

SEQ ID NO: 810 - protein, 15 aa, Homo sapiens
  Heavy chain CDR3 for antibody 405 (IGHV1-2)
ARDIVVVPAAMGLDY

SEQ ID NO: 811 - protein, 11 aa, Homo sapiens
  Light chain CDR3 for antibody 406 (IGKV3-15)
QQYNNLPPMYT

SEQ ID NO: 812 - protein, 17 aa, Homo sapiens
  Heavy chain CDR3 for antibody 406 (IGHV1-2)
ARAGAAGTPYYYYYMDV

SEQ ID NO: 813 - protein, 11 aa, Homo sapiens
  Light chain CDR3 for antibody 407 (IGKV1-12)
QQANSFPPQFT

SEQ ID NO: 814 - protein, 17 aa, Homo sapiens
  Heavy chain CDR3 for antibody 407 (IGHV4/OR15-8)
ARDLTDYGDHGGYWFDP

SEQ ID NO: 815 - protein, 10 aa, Homo sapiens
  Light chain CDR3 for antibody 408 (IGKV1-33)
QQYDNLLLLT

SEQ ID NO: 816 - protein, 23 aa, Homo sapiens
  Heavy chain CDR3 for antibody 408 (IGHV4-31)
ARMPRPGWSPSWFGETDHRPLDY

SEQ ID NO: 817 - protein, 10 aa, Homo sapiens
  Light chain CDR3 for antibody 409 (IGKV1-9)
QQLNSYPGPT

SEQ ID NO: 818 - protein, 12 aa, Homo sapiens
  Heavy chain CDR3 for antibody 409 (IGHV5-51)
ARQGYYGDYFDS

SEQ ID NO: 819 - protein, 9 aa, Homo sapiens
  Light chain CDR3 for antibody 410 (IGKV1-6)
LQDYNYPWT

SEQ ID NO: 820 - protein, 18 aa, Homo sapiens
  Heavy chain CDR3 for antibody 410 (IGHV2-5)
ARYSGCSYGYPRAYGMGV

SEQ ID NO: 821 - protein, 9 aa, Homo sapiens
  Light chain CDR3 for antibody 411 (IGKV3-20)
QQYGSSPYT

SEQ ID NO: 822 - protein, 17 aa, Homo sapiens
  Heavy chain CDR3 for antibody 411 (IGHV1-69)
ARHSSDGDYYYYYGMDV

SEQ ID NO: 823 - protein, 10 aa, Homo sapiens
  Light chain CDR3 for antibody 412 (IGKV3-11)
QQRSNWPPAT

SEQ ID NO: 824 - protein, 18 aa, Homo sapiens
  Heavy chain CDR3 for antibody 412 (IGHV2-5)
AHYSGYSYGYPRAYGMDV

SEQ ID NO: 825 - protein, 9 aa, Homo sapiens
  Light chain CDR3 for antibody 413 (IGKV1-9)
QQLNSYPPA

SEQ ID NO: 826 - protein, 9 aa, Homo sapiens
  Heavy chain CDR3 for antibody 413 (IGHV4-30-2)
TRGGHYTDP

SEQ ID NO: 827 - protein, 10 aa, Homo sapiens
  Light chain CDR3 for antibody 414 (IGKV1-9)
QQLNSYPGPT

SEQ ID NO: 828 - protein, 12 aa, Homo sapiens
  Heavy chain CDR3 for antibody 414 (IGHV3-66)
AIDLSESGGFDY

SEQ ID NO: 829 - protein, 8 aa, Homo sapiens
  Light chain CDR3 for antibody 415 (IGKV3-11)
QQRSNWFT

SEQ ID NO: 830 - protein, 17 aa, Homo sapiens
  Heavy chain CDR3 for antibody 415 (IGHV1-2)
ARARAAGTPYDYYYMDV

SEQ ID NO: 831 - protein, 9 aa, Homo sapiens
  Light chain CDR3 for antibody 416 (IGKV1-6)
LQDYNYPWT

SEQ ID NO: 832 - protein, 18 aa, Homo sapiens
  Heavy chain CDR3 for antibody 416 (IGHV2-5)
AHYSGYSYGFPRDYGMGV

SEQ ID NO: 833 - protein, 8 aa, Homo sapiens
  Light chain CDR3 for antibody 417 (IGKV3-11)
QQRSNWFT

SEQ ID NO: 834 - protein, 17 aa, Homo sapiens
  Heavy chain CDR3 for antibody 417 (IGHV1-2)
ARADAASTPYYYYYIDV

SEQ ID NO: 835 - protein, 9 aa, Homo sapiens
  Light chain CDR3 for antibody 418 (IGKV1-6)
LQDYNYPWT

SEQ ID NO: 836 - protein, 11 aa, Homo sapiens
  Heavy chain CDR3 for antibody 418 (IGHV3-53)
ARDGRGDLWYY

SEQ ID NO: 837 - protein, 10 aa, Homo sapiens
  Light chain CDR3 for antibody 419 (IGKV1-9)
QQLNSYPGPT

SEQ ID NO: 838 - protein, 16 aa, Homo sapiens
  Heavy chain CDR3 for antibody 419 (IGHV1-69)
ARDHSGSYYYYYGMDV

SEQ ID NO: 839 - protein, 10 aa, Homo sapiens
  Light chain CDR3 for antibody 420 (IGKV1-33)
QQYDNLPSLT

SEQ ID NO: 840 - protein, 19 aa, Homo sapiens
  Heavy chain CDR3 for antibody 420 (IGHV4-31)
ARAPSITHFVARVVDAFDI

SEQ ID NO: 841 - protein, 11 aa, Homo sapiens
  Light chain CDR3 for antibody 421 (IGKV1D-12)
QQANSFPPLFT

SEQ ID NO: 842 - protein, 20 aa, Homo sapiens
  Heavy chain CDR3 for antibody 421 (IGHV2-26)
ARTTYYYDSSGYYPLNYFDY

SEQ ID NO: 843 - protein, 9 aa, Homo sapiens
  Light chain CDR3 for antibody 422 (IGKV1-12)
QQANSFPYS

SEQ ID NO: 844 - protein, 13 aa, Homo sapiens
  Heavy chain CDR3 for antibody 422 (IGHV4-31)
ARDYGGNSAQFGY

SEQ ID NO: 845 - protein, 9 aa, Homo sapiens
  Light chain CDR3 for antibody 423 (IGKV1-33)
QQYDNLPLT

SEQ ID NO: 846 - protein, 10 aa, Homo sapiens
  Heavy chain CDR3 for antibody 423 (IGHV3-66)
ARDLRSYYEY

SEQ ID NO: 847 - protein, 10 aa, Homo sapiens
  Light chain CDR3 for antibody 424 (IGKV2-30)
MQGTHWPPPP

SEQ ID NO: 848 - protein, 17 aa, Homo sapiens
  Heavy chain CDR3 for antibody 424 (IGHV1-69)
ARAGAAGTPYYYYYMDV

SEQ ID NO: 849 - protein, 10 aa, Homo sapiens
  Light chain CDR3 for antibody 425 (IGKV1-9)
QQVNSYPGPT

SEQ ID NO: 850 - protein, 12 aa, Homo sapiens
  Heavy chain CDR3 for antibody 425 (IGHV4-59)
ARGAGRYSHLDY

SEQ ID NO: 851 - protein, 9 aa, Homo sapiens
  Light chain CDR3 for antibody 426 (IGKV1-9)
QQLNSYPPS

SEQ ID NO: 852 - protein, 17 aa, Homo sapiens
  Heavy chain CDR3 for antibody 426 (IGHV1-2)
ARAGAAGAPYYYYCMDV

SEQ ID NO: 853 - protein, 9 aa, Homo sapiens
  Light chain CDR3 for antibody 427 (IGKV1-33)
QQYDNLPIT

SEQ ID NO: 854 - protein, 23 aa, Homo sapiens
  Heavy chain CDR3 for antibody 427 (IGHV1-2)
ARMPRPGWSPSWFGEADHRPLDY

SEQ ID NO: 855 - protein, 9 aa, Homo sapiens
  Light chain CDR3 for antibody 428 (IGKV1-6)
LQDYNYPWT

SEQ ID NO: 856 - protein, 18 aa, Homo sapiens
  Heavy chain CDR3 for antibody 428 (IGHV2-5)
AHYSGYSYGCARAYGMYV

SEQ ID NO: 857 - protein, 9 aa, Homo sapiens
  Light chain CDR3 for antibody 429 (IGKV1-9)
QQLNSYPPS

SEQ ID NO: 858 - protein, 22 aa, Homo sapiens
  Heavy chain CDR3 for antibody 429 (IGHV1-46)
ASEGGTRVYDSSGYDTGYGFDI

SEQ ID NO: 859 - protein, 10 aa, Homo sapiens
  Light chain CDR3 for antibody 430 (IGKV1-33)
QQYDNLPSLT

SEQ ID NO: 860 - protein, 16 aa, Homo sapiens
  Heavy chain CDR3 for antibody 430 (IGHV4-34)
ARGCSGGSCYPNPFDY

SEQ ID NO: 861 - protein, 8 aa, Homo sapiens
  Light chain CDR3 for antibody 431 (IGKV2D-28)
MQALQTPT

SEQ ID NO: 862 - protein, 17 aa, Homo sapiens
  Heavy chain CDR3 for antibody 431 (IGHV1-18)
ARGLRWCGADCYYGMDV

SEQ ID NO: 863 - protein, 9 aa, Homo sapiens
  Light chain CDR3 for antibody 432 (IGKV1-12)
QQYNTSPFT

SEQ ID NO: 864 - protein, 12 aa, Homo sapiens
  Heavy chain CDR3 for antibody 432 (IGHV3-66)
ARDLSEAGGFDY

SEQ ID NO: 865 - protein, 10 aa, Homo sapiens
  Light chain CDR3 for antibody 433 (IGKV1-9)
QQVNSYPGPT

SEQ ID NO: 866 - protein, 9 aa, Homo sapiens
  Heavy chain CDR3 for antibody 433 (IGHV4/OR15-8)
ARVLGAMCT

SEQ ID NO: 867 - protein, 8 aa, Homo sapiens
  Light chain CDR3 for antibody 434 (IGKV3-11)
QQRSNWFT

SEQ ID NO: 868 - protein, 17 aa, Homo sapiens
  Heavy chain CDR3 for antibody 434 (IGHV4/OR15-8)
ARDLTDYGDHGGYWFDP

SEQ ID NO: 869 - protein, 10 aa, Homo sapiens
  Light chain CDR3 for antibody 435 (IGKV3-11)
QQRSNWPPAT

SEQ ID NO: 870 - protein, 17 aa, Homo sapiens
  Heavy chain CDR3 for antibody 435 (IGHV1-2)
AREPSISRDGYSGYDDY

SEQ ID NO: 871 - protein, 10 aa, Homo sapiens
  Light chain CDR3 for antibody 436 (IGKV1-9)
QQLNSYPRPT

SEQ ID NO: 872 - protein, 12 aa, Homo sapiens
  Heavy chain CDR3 for antibody 436 (IGHV3-66)
ARDLSEAGGFDS

SEQ ID NO: 873 - protein, 9 aa, Homo sapiens
  Light chain CDR3 for antibody 437 (IGKV1-9)
QQLNSYPVA

SEQ ID NO: 874 - protein, 10 aa, Homo sapiens
  Heavy chain CDR3 for antibody 437 (IGHV3-66)
ARDLRNYFSY

SEQ ID NO: 875 - protein, 9 aa, Homo sapiens
  Light chain CDR3 for antibody 438 (IGKV1-9)
QQLNIDRDT

SEQ ID NO: 876 - protein, 19 aa, Homo sapiens
  Heavy chain CDR3 for antibody 438 (IGHV4-31)
ARCTTTTQWLKMVVNWFDP

SEQ ID NO: 877 - protein, 10 aa, Homo sapiens
  Light chain CDR3 for antibody 439 (IGKV3-11)
QQRSNWPPYS

SEQ ID NO: 878 - protein, 17 aa, Homo sapiens
  Heavy chain CDR3 for antibody 439 (IGHV1-69)
ARGLLWFGADYYYGMDV

SEQ ID NO: 879 - protein, 10 aa, Homo sapiens
  Light chain CDR3 for antibody 440 (IGKV1-13)
QQLNSYPGPT

SEQ ID NO: 880 - protein, 12 aa, Homo sapiens
  Heavy chain CDR3 for antibody 440 (IGHV2-70)
ARGVEYYYYMDV

SEQ ID NO: 881 - protein, 9 aa, Homo sapiens
  Light chain CDR3 for antibody 441 (IGKV1-9)
QQLNSYPVA

SEQ ID NO: 882 - protein, 17 aa, Homo sapiens
  Heavy chain CDR3 for antibody 441 (IGHV1-69)
ARGLLWFGAEYYYGMDV

SEQ ID NO: 883 - protein, 9 aa, Homo sapiens
  Light chain CDR3 for antibody 442 (IGKV1-9)
QQLNSYPPA

SEQ ID NO: 884 - protein, 16 aa, Homo sapiens
  Heavy chain CDR3 for antibody 442 (IGHV3-53)
ARANPGAVGYYYGMDV

SEQ ID NO: 885 - protein, 9 aa, Homo sapiens
  Light chain CDR3 for antibody 443 (IGKV1-6)
LQDYNYPWT

SEQ ID NO: 886 - protein, 18 aa, Homo sapiens
  Heavy chain CDR3 for antibody 443 (IGHV2-5)
ADYSGSSYGHPRAYGMDV

SEQ ID NO: 887 - protein, 9 aa, Homo sapiens
  Light chain CDR3 for antibody 444 (IGKV1-6)
LQDYNYPWT

SEQ ID NO: 888 - protein, 11 aa, Homo sapiens
  Heavy chain CDR3 for antibody 444 (IGHV3-66)
ARETMVYGMDV

SEQ ID NO: 889 - protein, 8 aa, Homo sapiens
  Light chain CDR3 for antibody 445 (IGKV3-11)
QQRSNWFT

SEQ ID NO: 890 - protein, 17 aa, Homo sapiens
  Heavy chain CDR3 for antibody 445 (IGHV1-2)
ARAGAAGTPCCYYYMDA

SEQ ID NO: 891 - protein, 9 aa, Homo sapiens
  Light chain CDR3 for antibody 446 (IGKV1-17)
LQHNSYPRT

SEQ ID NO: 892 - protein, 17 aa, Homo sapiens
  Heavy chain CDR3 for antibody 446 (IGHV4/OR15-8)
ARDLTDYGDHGGYWFDP

SEQ ID NO: 893 - protein, 8 aa, Homo sapiens
  Light chain CDR3 for antibody 447 (IGKV2D-28)
MQALQTPT

SEQ ID NO: 894 - protein, 14 aa, Homo sapiens
  Heavy chain CDR3 for antibody 447 (IGHV1-69)
AKNEASALLAWFDP

SEQ ID NO: 895 - protein, 9 aa, Homo sapiens
  Light chain CDR3 for antibody 448 (IGKV2D-28)
MQALQTPPT

SEQ ID NO: 896 - protein, 10 aa, Homo sapiens
  Heavy chain CDR3 for antibody 448 (IGHV3-66)
ARDLRSYYDY

SEQ ID NO: 897 - protein, 10 aa, Homo sapiens [sequence omitted]

SEQ ID NO: 898 - protein, 15 aa, Homo sapiens
  Heavy chain CDR3 for antibody 449 (IGHV4-34)
ARARRMVYVIDAFDI

SEQ ID NO: 899 - protein, 10 aa, Homo sapiens
  Light chain CDR3 for antibody 450 (IGKV1-9)
QQLDSYPGPT

SEQ ID NO: 900 - protein, 16 aa, Homo sapiens
  Heavy chain CDR3 for antibody 450 (IGHV1-69)
ARVEWGDFDYYYGMDV

SEQ ID NO: 901 - protein, 8 aa, Homo sapiens
  Light chain CDR3 for antibody 451 (IGKV3-11)
QQRSNWFT

SEQ ID NO: 902 - protein, 18 aa, Homo sapiens
  Heavy chain CDR3 for antibody 451 (IGHV1-69)
ARGEWEPLSYYYYYYMDV

SEQ ID NO: 903 - protein, 9 aa, Homo sapiens
  Light chain CDR3 for antibody 452 (IGKV1-39)
QQSHTFPLT

SEQ ID NO: 904 - protein, 12 aa, Homo sapiens
  Heavy chain CDR3 for antibody 452 (IGHV3-66)
ARDLSAAGGFDY

SEQ ID NO: 905 - protein, 9 aa, Homo sapiens
  Light chain CDR3 for antibody 453 (IGKV1-6)
LQDYNYPWT

SEQ ID NO: 906 - protein, 17 aa, Homo sapiens
  Heavy chain CDR3 for antibody 453 (IGHV1-69)
ARHSSDGDYYYYYGMDV

SEQ ID NO: 907 - protein, 9 aa, Homo sapiens
  Light chain CDR3 for antibody 454 (IGKV1-27)
QKYNSAPLT

SEQ ID NO: 908 - protein, 12 aa, Homo sapiens
  Heavy chain CDR3 for antibody 454 (IGHV1-69)
ARDLEEQGAFDI

SEQ ID NO: 909 - protein, 10 aa, Homo sapiens
  Light chain CDR3 for antibody 455 (IGKV1-9)
QQLDTYPGPT

SEQ ID NO: 910 - protein, 9 aa, Homo sapiens
  Heavy chain CDR3 for antibody 455 (IGHV3-53)
ARESYGMDV

SEQ ID NO: 911 - protein, 11 aa, Homo sapiens
  Light chain CDR3 for antibody 456 (IGKV1-12)
QQANSFPPQFT

SEQ ID NO: 912 - protein, 12 aa, Homo sapiens
  Heavy chain CDR3 for antibody 456 (IGHV3-66)
ARYLEKQGAFDI

SEQ ID NO: 913 - protein, 10 aa, Homo sapiens
  Light chain CDR3 for antibody 457 (IGKV1-9)
QQLNSYPGPT

SEQ ID NO: 914 - protein, 10 aa, Homo sapiens
  Heavy chain CDR3 for antibody 457 (IGHV3-66)
ARELRSYSDY

SEQ ID NO: 915 - protein, 9 aa, Homo sapiens
  Light chain CDR3 for antibody 458 (IGKV1-33)
QQYDNLPLT

SEQ ID NO: 916 - protein, 11 aa, Homo sapiens
  Heavy chain CDR3 for antibody 458 (IGHV3-53)
ARDLGPYGMDV

SEQ ID NO: 917 - protein, 10 aa, Homo sapiens [sequence omitted]

SEQ ID NO: 918 - protein, 18 aa, Homo sapiens
  Heavy chain CDR3 for antibody 459 (IGHV3-30)
AKDGSWYYDSSGYPVFDY

SEQ ID NO: 919 - protein, 11 aa, Homo sapiens
  Light chain CDR3 for antibody 460 (IGKV3-20)
QQYGGSPPNFT

SEQ ID NO: 920 - protein, 16 aa, Homo sapiens
  Heavy chain CDR3 for antibody 460 (IGHV1-24)
ATASPIAVAGNNWFDP

SEQ ID NO: 921 - protein, 9 aa, Homo sapiens
  Light chain CDR3 for antibody 461 (IGKV1D-12)
QQANSFPLT

SEQ ID NO: 922 - protein, 16 aa, Homo sapiens
  Heavy chain CDR3 for antibody 461 (IGHV4-31)
ARASAIFGVVIREFDY

SEQ ID NO: 923 - protein, 9 aa, Homo sapiens
  Light chain CDR3 for antibody 462 (IGKV3-11)
QQRSNWPRT

SEQ ID NO: 924 - protein, 14 aa, Homo sapiens
  Heavy chain CDR3 for antibody 462 (IGHV3-53)
AREWWARDGYYMDV

SEQ ID NO: 925 - protein, 10 aa, Homo sapiens
  Light chain CDR3 for antibody 463 (IGKV1-33)
QQYDNLPWRS

SEQ ID NO: 926 - protein, 11 aa, Homo sapiens
  Heavy chain CDR3 for antibody 463 (IGHV3-53)
ARDLGPYGMDV

SEQ ID NO: 927 - protein, 10 aa, Homo sapiens
  Light chain CDR3 for antibody 464 (IGKV1-9)
QQLDTYPGPT

SEQ ID NO: 928 - protein, 11 aa, Homo sapiens
  Heavy chain CDR3 for antibody 464 (IGHV3-66)
ARETMVYGMDV

SEQ ID NO: 929 - protein, 9 aa, Homo sapiens
  Light chain CDR3 for antibody 465 (IGKV1-9)
QQLNSYPPA

SEQ ID NO: 930 - protein, 19 aa, Homo sapiens
  Heavy chain CDR3 for antibody 465 (IGHV1-69)
ARAHRSSTSYRLGINWFDP

SEQ ID NO: 931 - protein, 9 aa, Homo sapiens
  Light chain CDR3 for antibody 466 (IGKV1-9)
QQLNSYPVA

SEQ ID NO: 932 - protein, 10 aa, Homo sapiens
  Heavy chain CDR3 for antibody 466 (IGHV3-66)
ARDLRRYFDY

SEQ ID NO: 933 - protein, 10 aa, Homo sapiens
  Light chain CDR3 for antibody 467 (IGKV1-9)
QQLDTYPGPT

SEQ ID NO: 934 - protein, 12 aa, Homo sapiens
  Heavy chain CDR3 for antibody 467 (IGHV3-66)
ARDLEEQGAFDI

SEQ ID NO: 935 - protein, 10 aa, Homo sapiens
  Light chain CDR3 for antibody 468 (IGKV1-9)
QQLNSYPGPT

SEQ ID NO: 936 - protein, 11 aa, Homo sapiens
  Heavy chain CDR3 for antibody 468 (IGHV3-30)
ARDWAIHSFDY

SEQ ID NO: 937 - protein, 9 aa, Homo sapiens
  Light chain CDR3 for antibody 469 (IGKV1-6)
LQDYNYPWT

SEQ ID NO: 938 - protein, 18 aa, Homo sapiens
  Heavy chain CDR3 for antibody 469 (IGHV2-5)
AHYSGYRYGSPRAYGMDV

SEQ ID NO: 939 - protein, 10 aa, Homo sapiens
  Light chain CDR3 for antibody 470 (IGKV1-9)
QQLNSYPSIT

SEQ ID NO: 940 - protein, 10 aa, Homo sapiens
  Heavy chain CDR3 for antibody 470 (IGHV3-66)
ARDLRSYYDY

SEQ ID NO: 941 - protein, 9 aa, Homo sapiens
  Light chain CDR3 for antibody 471 (IGKV1-9)
QQLNSYPVA

SEQ ID NO: 942 - protein, 20 aa, Homo sapiens
  Heavy chain CDR3 for antibody 471 (IGHV3-NL1)
AKQLGQYCSGGSCYSGYFDY

SEQ ID NO: 943 - protein, 9 aa, Homo sapiens
  Light chain CDR3 for antibody 472 (IGKV1-6)
LQDYNYPWT

SEQ ID NO: 944 - protein, 23 aa, Homo sapiens
  Heavy chain CDR3 for antibody 472 (IGHV1-2)
ARMPRPGWSPSWFGETDHRPLDY

SEQ ID NO: 945 - protein, 10 aa, Homo sapiens
  Light chain CDR3 for antibody 473 (IGKV1-9)
QQLNSYPGPT

SEQ ID NO: 946 - protein, 16 aa, Homo sapiens
  Heavy chain CDR3 for antibody 473 (IGHV4-61)
ARDGSYSSSWKNWFDP

SEQ ID NO: 947 - protein, 9 aa, Homo sapiens
  Light chain CDR3 for antibody 474 (IGKV1-6)
LQDYNYPWT

SEQ ID NO: 948 - protein, 16 aa, Homo sapiens
  Heavy chain CDR3 for antibody 474 (IGHV4-34)
ARGCSGGSCYPNPFDY

SEQ ID NO: 949 - protein, 10 aa, Homo sapiens
  Light chain CDR3 for antibody 475 (IGKV4-1)
QQYYSTPLYT

SEQ ID NO: 950 - protein, 17 aa, Homo sapiens
  Heavy chain CDR3 for antibody 475 (IGHV1-2)
AREPSISRDGYSGYDDY

SEQ ID NO: 951 - protein, 10 aa, Homo sapiens [sequence omitted]

SEQ ID NO: 952 - protein, 16 aa, Homo sapiens
  Heavy chain CDR3 for antibody 476 (IGHV1-2)
ARAGAAGTPYYYYMDV

SEQ ID NO: 953 - protein, 8 aa, Homo sapiens
  Light chain CDR3 for antibody 477 (IGKV3-11)
QQRSNWFT

SEQ ID NO: 954 - protein, 20 aa, Homo sapiens
  Heavy chain CDR3 for antibody 477 (IGHV4-39)
ARTGHLIRFLEWLPITWFDP

SEQ ID NO: 955 - protein, 8 aa, Homo sapiens
  Light chain CDR3 for antibody 478 (IGKV2D-28)
MQALQTPT

SEQ ID NO: 956 - protein, 9 aa, Homo sapiens
  Heavy chain CDR3 for antibody 478 (IGHV3-53)
ARESYGMDV

SEQ ID NO: 957 - protein, 9 aa, Homo sapiens
  Light chain CDR3 for antibody 479 (IGKV1-6)
LQDYNYPWT

SEQ ID NO: 958 - protein, 12 aa, Homo sapiens
  Heavy chain CDR3 for antibody 479 (IGHV3-53)
ARDLGSVGATDY

SEQ ID NO: 959 - protein, 8 aa, Homo sapiens
  Light chain CDR3 for antibody 480 (IGKV3-11)
QQRSNWFT

SEQ ID NO: 960 - protein, 16 aa, Homo sapiens
  Heavy chain CDR3 for antibody 480 (IGHV1-69)
ARDHSGSYYYYYGMDV

SEQ ID NO: 961 - protein, 9 aa, Homo sapiens
  Light chain CDR3 for antibody 481 (IGKV1-9)
QQLNSYPVA

SEQ ID NO: 962 - protein, 10 aa, Homo sapiens
  Heavy chain CDR3 for antibody 481 (IGHV3-30)
ARDLRSYFDF

SEQ ID NO: 963 - protein, 9 aa, Homo sapiens
  Light chain CDR3 for antibody 482 (IGKV1-17)
LQHNSYPRT

SEQ ID NO: 964 - protein, 11 aa, Homo sapiens
  Heavy chain CDR3 for antibody 482 (IGHV3-66)
ARDLQVYGMDV

SEQ ID NO: 965 - protein, 8 aa, Homo sapiens
  Light chain CDR3 for antibody 483 (IGKV3-11)
QQRSNWFT

SEQ ID NO: 966 - protein, 14 aa, Homo sapiens
  Heavy chain CDR3 for antibody 483 (IGHV1-69)
AKNEASALLAWFDP

SEQ ID NO: 967 - protein, 8 aa, Homo sapiens
  Light chain CDR3 for antibody 484 (IGKV1-6)
QDCNYPWT

SEQ ID NO: 968 - protein, 18 aa, Homo sapiens
  Heavy chain CDR3 for antibody 484 (IGHV2-5)
AHYSGYSYGYPRAYGMDV

SEQ ID NO: 969 - protein, 10 aa, Homo sapiens
  Light chain CDR3 for antibody 485 (IGKV3-11)
QQRSNWPPYT

SEQ ID NO: 970 - protein, 11 aa, Homo sapiens
  Heavy chain CDR3 for antibody 485 (IGHV1-69)
AGWFGESEFDY

SEQ ID NO: 971 - protein, 10 aa, Homo sapiens
  Light chain CDR3 for antibody 486 (IGKV1-33)
QQYDNLLLLT

SEQ ID NO: 972 - protein, 18 aa, Homo sapiens
  Heavy chain CDR3 for antibody 486 (IGHV2-5)
AHYSGYSYGYPRAYGMDV

SEQ ID NO: 973 - protein, 9 aa, Homo sapiens
  Light chain CDR3 for antibody 487 (IGKV1-6)
LQDYNYPWT

SEQ ID NO: 974 - protein, 19 aa, Homo sapiens
  Heavy chain CDR3 for antibody 487 (IGHV4-31)
ARCTTTTQWLKMVVNWFDP

SEQ ID NO: 975 - protein, 8 aa, Homo sapiens
  Light chain CDR3 for antibody 488 (IGKV3-11)
QQRSNWFT

SEQ ID NO: 976 - protein, 13 aa, Homo sapiens
  Heavy chain CDR3 for antibody 488 (IGHV4-31)
ARDYGGNSAQFGY

SEQ ID NO: 977 - protein, 8 aa, Homo sapiens
  Light chain CDR3 for antibody 489 (IGKV1-33)
QQYDNLPG

SEQ ID NO: 978 - protein, 17 aa, Homo sapiens
  Heavy chain CDR3 for antibody 489 (IGHV1-69)
ARGLLWFGADYYYGMDV

SEQ ID NO: 979 - protein, 8 aa, Homo sapiens
  Light chain CDR3 for antibody 490 (IGKV1-5)
QQYNSYST

SEQ ID NO: 980 - protein, 16 aa, Homo sapiens
  Heavy chain CDR3 for antibody 490 (IGHV3-53)
AKWARGGDVDYYGMDV

SEQ ID NO: 981 - protein, 10 aa, Homo sapiens [sequence omitted]

SEQ ID NO: 982 - protein, 17 aa, Homo sapiens
  Heavy chain CDR3 for antibody 491 (IGHV4-59)
ARSPRGWLEQQPGYFDY

SEQ ID NO: 983 - protein, 8 aa, Homo sapiens
  Light chain CDR3 for antibody 492 (IGKV3-11)
QQRSNWFT

SEQ ID NO: 984 - protein, 15 aa, Homo sapiens
  Heavy chain CDR3 for antibody 492 (IGHV1-46)
ARDIVVVPAAMGLDY

SEQ ID NO: 985 - protein, 10 aa, Homo sapiens
  Light chain CDR3 for antibody 493 (IGKV1-39)
QQSYSTPPIT

SEQ ID NO: 986 - protein, 13 aa, Homo sapiens
  Heavy chain CDR3 for antibody 493 (IGHV3-53)
ARERGDTAMAVGD

SEQ ID NO: 987 - protein, 9 aa, Homo sapiens
  Light chain CDR3 for antibody 494 (IGKV1-33)
QQYDNLPLT

SEQ ID NO: 988 - protein, 19 aa, Homo sapiens
  Heavy chain CDR3 for antibody 494 (IGHV1-69)
ARDRLRIQLSPHYYYYMDV

SEQ ID NO: 989 - protein, 9 aa, Homo sapiens
  Light chain CDR3 for antibody 495 (IGKV1-12)
QEADGFPWA

SEQ ID NO: 990 - protein, 14 aa, Homo sapiens
  Heavy chain CDR3 for antibody 495 (IGHV3-30)
AKEATKRASRHFDF

SEQ ID NO: 991 - protein, 10 aa, Homo sapiens
  Light chain CDR3 for antibody 496 (IGKV3-20)
QQYGSSPPDT

SEQ ID NO: 992 - protein, 13 aa, Homo sapiens
  Heavy chain CDR3 for antibody 496 (IGHV5-51)
ARRYSGFHAELDY

SEQ ID NO: 993 - protein, 9 aa, Homo sapiens
  Light chain CDR3 for antibody 497 (IGKV1-33)
QQYDNLPIT

SEQ ID NO: 994 - protein, 14 aa, Homo sapiens
  Heavy chain CDR3 for antibody 497 (IGHV3-53)
ARIGSGYYYYGMDV

SEQ ID NO: 995 - protein, 9 aa, Homo sapiens
  Light chain CDR3 for antibody 498 (IGKV1-39)
QQSYSTPKT

SEQ ID NO: 996 - protein, 12 aa, Homo sapiens
  Heavy chain CDR3 for antibody 498 (IGHV3-64)
ASLAGYSGYYDY

SEQ ID NO: 997 - protein, 9 aa, Homo sapiens
  Light chain CDR3 for antibody 499 (IGKV3-20)
QQYGSSPET

SEQ ID NO: 998 - protein, 13 aa, Homo sapiens
  Heavy chain CDR3 for antibody 499 (IGHV1-69)
ARFPNAALRAFDI

SEQ ID NO: 999 - protein, 9 aa, Homo sapiens
  Light chain CDR3 for antibody 500 (IGKV1-12)
QQGNSFPPA

SEQ ID NO: 1000 - protein, 11 aa, Homo sapiens
  Heavy chain CDR3 for antibody 500 (IGHV4-30-2)
ARGTKVVTFDS

SEQ ID NO: 1001 - protein, 9 aa, Homo sapiens
  Light chain CDR3 for antibody 501 (IGKV1-27)
QKYNSAPLT

SEQ ID NO: 1002 - protein, 9 aa, Homo sapiens
  Heavy chain CDR3 for antibody 501 (IGHV4-61)
VRGRGRTTT

SEQ ID NO: 1003 - protein, 9 aa, Homo sapiens
  Light chain CDR3 for antibody 502 (IGKV1-33)
QQYDNLPLT

SEQ ID NO: 1004 - protein, 13 aa, Homo sapiens
  Heavy chain CDR3 for antibody 502 (IGHV3-53)
ARERGDTAMAVGD

SEQ ID NO: 1005 - protein, 9 aa, Homo sapiens
  Light chain CDR3 for antibody 503 (IGKV3-11)
QQRSDWPPT

SEQ ID NO: 1006 - protein, 16 aa, Homo sapiens
  Heavy chain CDR3 for antibody 503 (IGHV4-39)
VRPTMNTEGGVHWFDP

SEQ ID NO: 1007 - protein, 9 aa, Homo sapiens
  Light chain CDR3 for antibody 504 (IGKV1D-12)
QQGDSFPLT

SEQ ID NO: 1008 - protein, 13 aa, Homo sapiens
  Heavy chain CDR3 for antibody 504 (IGHV3-74)
VRDQYGENFYMDV

SEQ ID NO: 1009 - protein, 10 aa, Homo sapiens
  Light chain CDR3 for antibody 505 (IGKV1-39)
QQSYSTPPWT

SEQ ID NO: 1010 - protein, 18 aa, Homo sapiens
  Heavy chain CDR3 for antibody 505 (IGHV3-13)
ARGVSSSWGYYYYYYMDV

SEQ ID NO: 1011 - protein, 10 aa, Homo sapiens
  Light chain CDR3 for antibody 506 (IGKV2-30)
MQGTHWPPWT

SEQ ID NO: 1012 - protein, 12 aa, Homo sapiens
  Heavy chain CDR3 for antibody 506 (IGHV3-15)
TTSVGGNSGVDC

SEQ ID NO: 1013 - protein, 10 aa, Homo sapiens
  Light chain CDR3 for antibody 507 (IGKV1-39)
QQSYSTPPIT

SEQ ID NO: 1014 - protein, 19 aa, Homo sapiens
  Heavy chain CDR3 for antibody 507 (IGHV1-69)
ARDRLRIQLSPHYYYYMDV

SEQ ID NO: 1015 - protein, 9 aa, Homo sapiens
  Light chain CDR3 for antibody 508 (IGKV3-20)
HQYGSTPWT

SEQ ID NO: 1016 - protein, 18 aa, Homo sapiens
  Heavy chain CDR3 for antibody 508 (IGHV4-4)
ARGEAADEVGHHYGALDY

SEQ ID NO: 1017 - protein, 9 aa, Homo sapiens
  Light chain CDR3 for antibody 509 (IGKV3-20)
QQCAHAPLT

SEQ ID NO: 1018 - protein, 10 aa, Homo sapiens
  Heavy chain CDR3 for antibody 509 (IGHV4-39)
AGGAGWTADH

SEQ ID NO: 1019 - protein, 9 aa, Homo sapiens
  Light chain CDR3 for antibody 510 (IGKV3-20)
QQYGSSSWT

SEQ ID NO: 1020 - protein, 9 aa, Homo sapiens
  Heavy chain CDR3 for antibody 510 (IGHV3-11)
ARGNYGMDV

SEQ ID NO: 1021 - protein, 9 aa, Homo sapiens
  Light chain CDR3 for antibody 511 (IGKV1-12)
QEADGFPWA

SEQ ID NO: 1022 - protein, 13 aa, Homo sapiens
  Heavy chain CDR3 for antibody 511 (IGHV3-53)
ARERGDTAMAVGD

SEQ ID NO: 1023 - protein, 10 aa, Homo sapiens
  Light chain CDR3 for antibody 512 (IGKV1-39)
QQSYSTPPIT

SEQ ID NO: 1024 - protein, 11 aa, Homo sapiens
  Heavy chain CDR3 for antibody 512 (IGHV3-53)
ARDLGPYGMDV

SEQ ID NO: 1025 - protein, 9 aa, Homo sapiens
  Light chain CDR3 for antibody 513 (IGKV1-NL1)
QQYYSTPWT

SEQ ID NO: 1026 - protein, 11 aa, Homo sapiens
  Heavy chain CDR3 for antibody 513 (IGHV3-53)
ARDLQVYGMDV

SEQ ID NO: 1027 - protein, 10 aa, Homo sapiens
  Light chain CDR3 for antibody 514 (IGKV1-39)
QQSYSTPPIT

SEQ ID NO: 1028 - protein, 14 aa, Homo sapiens
  Heavy chain CDR3 for antibody 514 (IGHV3-30)
AKEATKRASRHFDF

SEQ ID NO: 1029 - protein, 9 aa, Homo sapiens
  Light chain CDR3 for antibody 515 (IGKV1-39)
QQYDSYSLT

SEQ ID NO: 1030 - protein, 15 aa, Homo sapiens
  Heavy chain CDR3 for antibody 515 (IGHV1-2)
ARGEIQTLRSMPSDY

SEQ ID NO: 1031 - protein, 10 aa, Homo sapiens
  Light chain CDR3 for antibody 516 (IGKV2-30)
VQGTHRPPNT

SEQ ID NO: 1032 - protein, 10 aa, Homo sapiens
  Heavy chain CDR3 for antibody 516 (IGHV6-1)
ARDWEYSLDY

SEQ ID NO: 1033 - protein, 9 aa, Homo sapiens
  Light chain CDR3 for antibody 517 (IGKV1-39)
QQSYSTPLT

SEQ ID NO: 1034 - protein, 18 aa, Homo sapiens
  Heavy chain CDR3 for antibody 517 (IGHV3-48)
ARYSSGWYRHPLPNGMDV

SEQ ID NO: 1035 - protein, 10 aa, Homo sapiens
  Light chain CDR3 for antibody 518 (IGKV1-39)
QQSYSTPPWT

SEQ ID NO: 1036 - protein, 14 aa, Homo sapiens
  Heavy chain CDR3 for antibody 518 (IGHV1-2)
ARWWIWFGEFIMDV

SEQ ID NO: 1037 - protein, 10 aa, Homo sapiens
  Light chain CDR3 for antibody 519 (IGKV3-11)
QQRSNWPPRT

SEQ ID NO: 1038 - protein, 13 aa, Homo sapiens
  Heavy chain CDR3 for antibody 519 (IGHV1-69)
ASCTNYYYYYMYV

SEQ ID NO: 1039 - protein, 9 aa, Homo sapiens
  Light chain CDR3 for antibody 520 (IGKV1-39)
QQSHSPIWT

SEQ ID NO: 1040 - protein, 18 aa, Homo sapiens
  Heavy chain CDR3 for antibody 520 (IGHV4-30-2)
ATNVTLTGDQKRRGWFDP

SEQ ID NO: 1041 - protein, 10 aa, Homo sapiens
  Light chain CDR3 for antibody 521 (IGKV1-39)
QQSYSTPPIT

SEQ ID NO: 1042 - protein, 14 aa, Homo sapiens
  Heavy chain CDR3 for antibody 521 (IGHV3-53)
ARIGSGYYYYGMDV

SEQ ID NO: 1043 - protein, 9 aa, Homo sapiens
  Light chain CDR3 for antibody 522 (IGKV1-33)
QQYDAFPIT

SEQ ID NO: 1044 - protein, 14 aa, Homo sapiens
  Heavy chain CDR3 for antibody 522 (IGHV4-59)
ARGSTHCGGDCYHD

SEQ ID NO: 1045 - protein, 9 aa, Homo sapiens
  Light chain CDR3 for antibody 523 (IGKV1-39)
QQTYTIPFT

SEQ ID NO: 1046 - protein, 10 aa, Homo sapiens
  Heavy chain CDR3 for antibody 523 (IGHV1-58)
AAAGNGAEDY

SEQ ID NO: 1047 - protein, 8 aa, Homo sapiens
  Light chain CDR3 for antibody 524 (IGKV3-11)
QQRSNWIT

SEQ ID NO: 1048 - protein, 12 aa, Homo sapiens
  Heavy chain CDR3 for antibody 524 (IGHV1-8)
ARAGYSGSYPDY

SEQ ID NO: 1049 - protein, 9 aa, Homo sapiens
  Light chain CDR3 for antibody 525 (IGKV1-39)
QQSYSTPKT

SEQ ID NO: 1050 - protein, 13 aa, Homo sapiens
  Heavy chain CDR3 for antibody 525 (IGHV3-53)
ARERGDTAMAVGD

SEQ ID NO: 1051 - protein, 9 aa, Homo sapiens
  Light chain CDR3 for antibody 526 (IGKV1-39)
QQSYTTPHT

SEQ ID NO: 1052 - protein, 11 aa, Homo sapiens
  Heavy chain CDR3 for antibody 526 (IGHV2-5)
AHSTILVSLDY

SEQ ID NO: 1053 - protein, 8 aa, Homo sapiens
  Light chain CDR3 for antibody 527 (IGKV3-20)
QQYGSSPT

SEQ ID NO: 1054 - protein, 19 aa, Homo sapiens
  Heavy chain CDR3 for antibody 527 (IGHV1-69)
ARDRLRIQLSPHYYYYMDV

SEQ ID NO: 1055 - protein, 9 aa, Homo sapiens
  Light chain CDR3 for antibody 528 (IGKV3-11)
QQRNIWPLT

SEQ ID NO: 1056 - protein, 10 aa, Homo sapiens
  Heavy chain CDR3 for antibody 528 (IGHV4-39)
ARETESRGDY

SEQ ID NO: 1057 - protein, 9 aa, Homo sapiens
  Light chain CDR3 for antibody 529 (IGKV1-39)
QQSYSTPPT

SEQ ID NO: 1058 - protein, 14 aa, Homo sapiens
  Heavy chain CDR3 for antibody 529 (IGHV3-30)
ARSRGGNYYYGMDV

SEQ ID NO: 1059 - protein, 9 aa, Homo sapiens
  Light chain CDR3 for antibody 530 (IGKV6-21)
HQSSSLPYS

SEQ ID NO: 1060 - protein, 13 aa, Homo sapiens
  Heavy chain CDR3 for antibody 530 (IGHV1-18)
AREDGDYVVSFDY

SEQ ID NO: 1061 - protein, 9 aa, Homo sapiens
  Light chain CDR3 for antibody 531 (IGKV1-39)
QQSYTTVRT

SEQ ID NO: 1062 - protein, 18 aa, Homo sapiens
  Heavy chain CDR3 for antibody 531 (IGHV2-70)
AHESRIFGLILSHWYFDV

SEQ ID NO: 1063 - protein, 9 aa, Homo sapiens
  Light chain CDR3 for antibody 532 (IGKV3-20)
QQYGSSLYT

SEQ ID NO: 1064 - protein, 13 aa, Homo sapiens
  Heavy chain CDR3 for antibody 532 (IGHV3-53)
ARERGDTAMAVGD

SEQ ID NO: 1065 - protein, 9 aa, Homo sapiens
  Light chain CDR3 for antibody 533 (IGKV3-11)
QQRNIWPLT

SEQ ID NO: 1066 - protein, 14 aa, Homo sapiens
  Heavy chain CDR3 for antibody 533 (IGHV3-30)
AKEATKRASRHFDF

SEQ ID NO: 1067 - protein, 10 aa, Homo sapiens
  Light chain CDR3 for antibody 534 (IGKV2-30)
MQGTHWPPWT

SEQ ID NO: 1068 - protein, 10 aa, Homo sapiens
  Heavy chain CDR3 for antibody 534 (IGHV6-1)
ARDWEYSLDY

SEQ ID NO: 1069 - protein, 9 aa, Homo sapiens
  Light chain CDR3 for antibody 535 (IGKV3-20)
HQYGSTPWT

SEQ ID NO: 1070 - protein, 13 aa, Homo sapiens
  Heavy chain CDR3 for antibody 535 (IGHV1-69)
ARGSGWYPIYFDY

SEQ ID NO: 1071 - protein, 9 aa, Homo sapiens
  Light chain CDR3 for antibody 536 (IGKV2D-28)
MQALQTPIT

SEQ ID NO: 1072 - protein, 14 aa, Homo sapiens
  Heavy chain CDR3 for antibody 536 (IGHV2-5)
AHRLSAMVSSYFDY

SEQ ID NO: 1073 - protein, 9 aa, Homo sapiens
  Light chain CDR3 for antibody 537 (IGKV1-33)
QQYDNLPYT

SEQ ID NO: 1074 - protein, 12 aa, Homo sapiens
  Heavy chain CDR3 for antibody 537 (IGHV3-15)
TTSVGGNSGVDC

SEQ ID NO: 1075 - protein, 10 aa, Homo sapiens
  Light chain CDR3 for antibody 538 (IGKV1-39)
QQSYSTPPIT

SEQ ID NO: 1076 - protein, 9 aa, Homo sapiens
  Heavy chain CDR3 for antibody 538 (IGHV3-53)
ARESYGMDV

SEQ ID NO: 1077 - protein, 10 aa, Homo sapiens
  Light chain CDR3 for antibody 539 (IGKV1-39)
QQSYSTPPIT

SEQ ID NO: 1078 - protein, 13 aa, Homo sapiens
  Heavy chain CDR3 for antibody 539 (IGHV4-31)
ARDYGGNSAQFGY

SEQ ID NO: 1079 - protein, 8 aa, Homo sapiens
  Light chain CDR3 for antibody 540 (IGKV2D-28)
MQALQTIT

SEQ ID NO: 1080 - protein, 22 aa, Homo sapiens
  Heavy chain CDR3 for antibody 540 (IGHV1-2)
ARDGAGDCGGDCLEYYYYYMDV

SEQ ID NO: 1081 - protein, 9 aa, Homo sapiens
  Light chain CDR3 for antibody 541 (IGKV1-39)
QQSYSTPLT

SEQ ID NO: 1082 - protein, 12 aa, Homo sapiens
  Heavy chain CDR3 for antibody 541 (IGHV3-15)
TTSVGGNSGVDC

SEQ ID NO: 1083 - protein, 9 aa, Homo sapiens
  Light chain CDR3 for antibody 542 (IGKV1-12)
QEADGFPWA

SEQ ID NO: 1084 - protein, 16 aa, Homo sapiens
  Heavy chain CDR3 for antibody 542 (IGHV4-39)
VRPTMNTEGGVHWFDP

SEQ ID NO: 1085 - protein, 9 aa, Homo sapiens
  Light chain CDR3 for antibody 543 (IGKV1-13)
QQSYSTPYT

SEQ ID NO: 1086 - protein, 14 aa, Homo sapiens
  Heavy chain CDR3 for antibody 543 (IGHV4-59)
AGLRWPLNYYGMDV

SEQ ID NO: 1087 - protein, 10 aa, Homo sapiens
  Light chain CDR3 for antibody 544 (IGKV1-13)
QQFNSYPPLT

SEQ ID NO: 1088 - protein, 12 aa, Homo sapiens
  Heavy chain CDR3 for antibody 544 (IGHV3-33)
AKDYPGNGYWVY

SEQ ID NO: 1089 - protein, 9 aa, Homo sapiens
  Light chain CDR3 for antibody 545 (IGKV3-NL5)
HQYAHSPLT

SEQ ID NO: 1090 - protein, 10 aa, Homo sapiens
  Heavy chain CDR3 for antibody 545 (IGHV3-11)
AGGSGWLQES

SEQ ID NO: 1091 - protein, 9 aa, Homo sapiens
  Light chain CDR3 for antibody 546 (IGKV1-5)
QQYNSYPYT

SEQ ID NO: 1092 - protein, 10 aa, Homo sapiens
  Heavy chain CDR3 for antibody 546 (IGHV1-f)
ARDSFGAYDI

SEQ ID NO: 1093 - protein, 8 aa, Homo sapiens
  Light chain CDR3 for antibody 547 (IGKV1-39)
QQSYSNPT

SEQ ID NO: 1094 - protein, 10 aa, Homo sapiens
  Heavy chain CDR3 for antibody 547 (IGHV4-61)
AIGMGWLIDY

SEQ ID NO: 1095 - protein, 9 aa, Homo sapiens
  Light chain CDR3 for antibody 548 (IGKV1-13)
QQFNTYPIT

SEQ ID NO: 1096 - protein, 18 aa, Homo sapiens
  Heavy chain CDR3 for antibody 548 (IGHV2-26)
ARSMSELRLWYFYYFMDV

SEQ ID NO: 1097 - protein, 9 aa, Homo sapiens
  Light chain CDR3 for antibody 549 (IGKV3-20)
HQYAYAPLT

SEQ ID NO: 1098 - protein, 10 aa, Homo sapiens
  Heavy chain CDR3 for antibody 549 (IGHV2-5)
AHGAGWLPDY

SEQ ID NO: 1099 - protein, 9 aa, Homo sapiens
  Light chain CDR3 for antibody 550 (IGKV1-39)
QQSHITPIT

SEQ ID NO: 1100 - protein, 13 aa, Homo sapiens
  Heavy chain CDR3 for antibody 550 (IGHV3-74)
VRDQYGENFYMDV

SEQ ID NO: 1101 - protein, 9 aa, Homo sapiens
  Light chain CDR3 for antibody 551 (IGKV1-5)
QQYNSYSWT

SEQ ID NO: 1102 - protein, 19 aa, Homo sapiens
  Heavy chain CDR3 for antibody 551 (IGHV3-33)
AKDLPPWGEYSSSLGGFDY

SEQ ID NO: 1103 - protein, 10 aa, Homo sapiens
  Light chain CDR3 for antibody 552 (IGKV1-12)
QQANSFLSFT

SEQ ID NO: 1104 - protein, 18 aa, Homo sapiens
  Heavy chain CDR3 for antibody 552 (IGHV4-4)
ARGEAADEVGHHYGALDY

SEQ ID NO: 1105 - protein, 8 aa, Homo sapiens
  Light chain CDR3 for antibody 553 (IGKV3-20)
QQYGSSPT

SEQ ID NO: 1106 - protein, 13 aa, Homo sapiens
  Heavy chain CDR3 for antibody 553 (IGHV3-53)
ARERGDTAMAVGD

SEQ ID NO: 1107 - protein, 9 aa, Homo sapiens
  Light chain CDR3 for antibody 554 (IGKV1-12)
QQANSFPIT

SEQ ID NO: 1108 - protein, 22 aa, Homo sapiens
  Heavy chain CDR3 for antibody 554 (IGHV1-2)
ARDGAGDCGGDCLEYYYYYMDV

SEQ ID NO: 1109 - protein, 9 aa, Homo sapiens
  Light chain CDR3 for antibody 555 (IGKV1-17)
LQDNRYPLT

SEQ ID NO: 1110 - protein, 13 aa, Homo sapiens
  Heavy chain CDR3 for antibody 555 (IGHV3-74)
VRDQYGENFYMDV

SEQ ID NO: 1111 - protein, 10 aa, Homo sapiens
  Light chain CDR3 for antibody 556 (IGKV1-39)
QQSYSTPPIT

SEQ ID NO: 1112 - protein, 12 aa, Homo sapiens
  Heavy chain CDR3 for antibody 556 (IGHV3-64)
ASLAGYSGYYDY

SEQ ID NO: 1113 - protein, 9 aa, Homo sapiens
  Light chain CDR3 for antibody 557 (IGKV1-5)
QQYHAYSSA

SEQ ID NO: 1114 - protein, 15 aa, Homo sapiens
  Heavy chain CDR3 for antibody 557 (IGHV1-8)
ARSYRASIGTPHFDD

SEQ ID NO: 1115 - protein, 11 aa, Homo sapiens
  Light chain CDR3 for antibody 558 (IGKV3-NL5)
QQYDASPPTWT

SEQ ID NO: 1116 - protein, 17 aa, Homo sapiens
  Heavy chain CDR3 for antibody 558 (IGHV4/OR15-8)
ARGKGWFGSHFSYYMDV

SEQ ID NO: 1117 - protein, 9 aa, Homo sapiens
  Light chain CDR3 for antibody 559 (IGKV1-39)
QQSYSTPYT

SEQ ID NO: 1118 - protein, 11 aa, Homo sapiens
  Heavy chain CDR3 for antibody 559 (IGHV4-b)
ARYSGSRYFDL

SEQ ID NO: 1119 - protein, 9 aa, Homo sapiens
  Light chain CDR3 for antibody 560 (IGKV1-5)
QQYHSYPYT

SEQ ID NO: 1120 - protein, 19 aa, Homo sapiens
  Heavy chain CDR3 for antibody 560 (IGHV5-51)
ARHAAARRGLWSYFYHVDV

SEQ ID NO: 1121 - protein, 10 aa, Homo sapiens
  Light chain CDR3 for antibody 561 (IGKV2-30)
MQGTHWPPWT

SEQ ID NO: 1122 - protein, 14 aa, Homo sapiens
  Heavy chain CDR3 for antibody 561 (IGHV3-30)
AKEATKRASRHFDF

SEQ ID NO: 1123 - protein, 9 aa, Homo sapiens
  Light chain CDR3 for antibody 562 (IGKV3-20)
QQYGSSPQT

SEQ ID NO: 1124 - protein, 19 aa, Homo sapiens
  Heavy chain CDR3 for antibody 562 (IGHV6-1)
ARATLRYFDWLYHYMGFDY

SEQ ID NO: 1125 - protein, 9 aa, Homo sapiens
  Light chain CDR3 for antibody 563 (IGKV1-33)
QQYDNLPLT

SEQ ID NO: 1126 - protein, 24 aa, Homo sapiens
  Heavy chain CDR3 for antibody 563 (IGHV1-46)
AGPITMVRGVIIPDYYYYYYGMDV

SEQ ID NO: 1127 - protein, 10 aa, Homo sapiens
  Light chain CDR3 for antibody 564 (IGKV1-9)
QQLNSYPSIT

SEQ ID NO: 1128 - protein, 13 aa, Homo sapiens
  Heavy chain CDR3 for antibody 564 (IGHV3-53)
ARERGDTAMAVGD

SEQ ID NO: 1129 - protein, 9 aa, Homo sapiens
  Light chain CDR3 for antibody 565 (IGKV1-9)
QQLTSYSYT

SEQ ID NO: 1130 - protein, 13 aa, Homo sapiens
  Heavy chain CDR3 for antibody 565 (IGHV3-53)
ARERGDTAMAVGD

SEQ ID NO: 1131 - protein, 9 aa, Homo sapiens
  Light chain CDR3 for antibody 566 (IGKV1-33)
QQYDNLPLT

SEQ ID NO: 1132 - protein, 18 aa, Homo sapiens
  Heavy chain CDR3 for antibody 566 (IGHV1-69)
ARDRLRIQLSPHYYYMDV

SEQ ID NO: 1133 - protein, 9 aa, Homo sapiens
  Light chain CDR3 for antibody 567 (IGKV3-20)
QQYGSSPQT

SEQ ID NO: 1134 - protein, 17 aa, Homo sapiens
  Heavy chain CDR3 for antibody 567 (IGHV4-39)
ARARRITIFGVVNEVDY

SEQ ID NO: 1135 - protein, 9 aa, Homo sapiens
  Light chain CDR3 for antibody 568 (IGKV1-5)
QQYRGYSWT

SEQ ID NO: 1136 - protein, 12 aa, Homo sapiens
  Heavy chain CDR3 for antibody 568 (IGHV4-30-2)
ATYAVGAGGRGS

SEQ ID NO: 1137 - protein, 11 aa, Homo sapiens
  Light chain CDR3 for antibody 569 (IGKV1-12)
QQYDNLPFALT

SEQ ID NO: 1138 - protein, 11 aa, Homo sapiens
  Heavy chain CDR3 for antibody 569 (IGHV4-30-2)
ARGTKVVTFDS

SEQ ID NO: 1139 - protein, 9 aa, Homo sapiens
  Light chain CDR3 for antibody 570 (IGKV3-20)
QQYGSSPRT

SEQ ID NO: 1140 - protein, 13 aa, Homo sapiens
  Heavy chain CDR3 for antibody 570 (IGHV3-74)
VRDQYGENFYMDV

SEQ ID NO: 1141 - protein, 10 aa, Homo sapiens
  Light chain CDR3 for antibody 571 (IGKV2-30)
MQGTHWPPWT

SEQ ID NO: 1142 - protein, 14 aa, Homo sapiens
  Heavy chain CDR3 for antibody 571 (IGHV1-2)
ARWWIWFGEFIMDV

SEQ ID NO: 1143 - protein, 9 aa, Homo sapiens
  Light chain CDR3 for antibody 572 (IGKV3-20)
HQYGSSPGT

SEQ ID NO: 1144 - protein, 12 aa, Homo sapiens
  Heavy chain CDR3 for antibody 572 (IGHV1-2)
ARSYYSSGNFDY

SEQ ID NO: 1145 - protein, 10 aa, Homo sapiens
  Light chain CDR3 for antibody 573 (IGKV1-39)
QQSYSTPPIT

SEQ ID NO: 1146 - protein, 24 aa, Homo sapiens
  Heavy chain CDR3 for antibody 573 (IGHV1-46)
AGPITMVRGVIIPDYYYYYYGMDV

SEQ ID NO: 1147 - protein, 9 aa, Homo sapiens
  Light chain CDR3 for antibody 574 (IGKV1-12)
QEADGFPWA

SEQ ID NO: 1148 - protein, 19 aa, Homo sapiens
  Heavy chain CDR3 for antibody 574 (IGHV1-69)
ARDRLRIQLSPHYYYYMDV

SEQ ID NO: 1149 - protein, 10 aa, Homo sapiens
  Light chain CDR3 for antibody 575 (IGKV3-20)
QQYGSSPPDT

SEQ ID NO: 1150 - protein, 13 aa, Homo sapiens
  Heavy chain CDR3 for antibody 575 (IGHV3-53)
ARERGDTAMAVGD

SEQ ID NO: 1151 - protein, 10 aa, Homo sapiens
  Light chain CDR3 for antibody 576 (IGKV1-12)
QQGNSFLPTT

SEQ ID NO: 1152 - protein, 13 aa, Homo sapiens
  Heavy chain CDR3 for antibody 576 (IGHV4-b)
AAGVVTRHRTLDY

SEQ ID NO: 1153 - protein, 9 aa, Homo sapiens
  Light chain CDR3 for antibody 577 (IGKV3-11)
QQRSDWPPT

SEQ ID NO: 1154 - protein, 18 aa, Homo sapiens
  Heavy chain CDR3 for antibody 577 (IGHV4-4)
ARGEAADEVGHHYGALDY

SEQ ID NO: 1155 - protein, 10 aa, Homo sapiens
  Light chain CDR3 for antibody 578 (IGKV1-37)
QRTYNAPRFT

SEQ ID NO: 1156 - protein, 18 aa, Homo sapiens
  Heavy chain CDR3 for antibody 578 (IGHV4-59)
ARGEAADEVGHHYGALDC

SEQ ID NO: 1157 - protein, 9 aa, Homo sapiens
  Light chain CDR3 for antibody 579 (IGKV1-5)
QQYNSNVRT

SEQ ID NO: 1158 - protein, 13 aa, Homo sapiens
  Heavy chain CDR3 for antibody 579 (IGHV3-23)
AKDKRGYTKPVDS

SEQ ID NO: 1159 - protein, 9 aa, Homo sapiens
  Light chain CDR3 for antibody 580 (IGKV3-20)
HQYGSTYWT

SEQ ID NO: 1160 - protein, 10 aa, Homo sapiens
  Heavy chain CDR3 for antibody 580 (IGHV3-23)
RNYDWVSRDC

SEQ ID NO: 1161 - protein, 9 aa, Homo sapiens
  Light chain CDR3 for antibody 581 (IGKV1-5)
QQYNSYPYT

SEQ ID NO: 1162 - protein, 15 aa, Homo sapiens
  Heavy chain CDR3 for antibody 581 (IGHV1-46)
AGGDGGNFRADAFDI

SEQ ID NO: 1163 - protein, 10 aa, Homo sapiens
  Light chain CDR3 for antibody 582 (IGKV3-20)
QQYGSSPLFT

SEQ ID NO: 1164 - protein, 22 aa, Homo sapiens
  Heavy chain CDR3 for antibody 582 (IGHV1-18)
ARVLVRYGAGSYPVYNYYGMDV

SEQ ID NO: 1165 - protein, 9 aa, Homo sapiens
  Light chain CDR3 for antibody 583 (IGKV1-16)
QQYSSYPPT

SEQ ID NO: 1166 - protein, 11 aa, Homo sapiens
  Heavy chain CDR3 for antibody 583 (IGHV5-51)
ARPQDREGVGY

SEQ ID NO: 1167 - protein, 10 aa, Homo sapiens
  Light chain CDR3 for antibody 584 (IGKV1-39)
QQSYSTPPIT

SEQ ID NO: 1168 - protein, 13 aa, Homo sapiens
  Heavy chain CDR3 for antibody 584 (IGHV5-51)
ARRYSGFHAELDY

SEQ ID NO: 1169 - protein, 10 aa, Homo sapiens
  Light chain CDR3 for antibody 585 (IGKV1-39)
QQSYSTPPIT

SEQ ID NO: 1170 - protein, 9 aa, Homo sapiens
  Heavy chain CDR3 for antibody 585 (IGHV4-61)
VRGRGRTTT

SEQ ID NO: 1171 - protein, 9 aa, Homo sapiens
  Light chain CDR3 for antibody 586 (IGKV1-33)
QQYDNLPLT

SEQ ID NO: 1172 - protein, 16 aa, Homo sapiens
  Heavy chain CDR3 for antibody 586 (IGHV1-18)
ARANPGAVGYYYGMDV

SEQ ID NO: 1173 - protein, 10 aa, Homo sapiens
  Light chain CDR3 for antibody 587 (IGKV1-39)
QQSYSTPPIT

SEQ ID NO: 1174 - protein, 16 aa, Homo sapiens
  Heavy chain CDR3 for antibody 587 (IGHV1-18)
ARANPGAVGYYYGMDV

SEQ ID NO: 1175 - protein, 9 aa, Homo sapiens
  Light chain CDR3 for antibody 588 (IGKV1-33)
QQYDNLPLT

SEQ ID NO: 1176 - protein, 11 aa, Homo sapiens
  Heavy chain CDR3 for antibody 588 (IGHV3-53)
ARDLQVYGMDV

SEQ ID NO: 1177 - protein, 10 aa, Homo sapiens
  Light chain CDR3 for antibody 589 (IGKV1-39)
QQSYSTPPIT

SEQ ID NO: 1178 - protein, 13 aa, Homo sapiens
  Heavy chain CDR3 for antibody 589 (IGHV3-74)
VRDQYGENFYMDV

SEQ ID NO: 1179 - protein, 9 aa, Homo sapiens
  Light chain CDR3 for antibody 590 (IGKV1-33)
QQYDNLPLT

SEQ ID NO: 1180 - protein, 14 aa, Homo sapiens
  Heavy chain CDR3 for antibody 590 (IGHV3-30)
AKEATKRASRHFDF

SEQ ID NO: 1181 - protein, 9 aa, Homo sapiens
  Light chain CDR3 for antibody 591 (IGKV1-39)
QQSYSTPPT

SEQ ID NO: 1182 - protein, 19 aa, Homo sapiens
  Heavy chain CDR3 for antibody 591 (IGHV1-69)
ARDRLRIQLSPHYYYYMDV

SEQ ID NO: 1183 - protein, 9 aa, Homo sapiens
  Light chain CDR3 for antibody 592 (IGKV3-20)
HQYGSTPWT

SEQ ID NO: 1184 - protein, 13 aa, Homo sapiens
  Heavy chain CDR3 for antibody 592 (IGHV3-53)
ARERGDTAMAVGD

SEQ ID NO: 1185 - protein, 9 aa, Homo sapiens
  Light chain CDR3 for antibody 593 (IGKV1-6)
LQDFTYPRT

SEQ ID NO: 1186 - protein, 19 aa, Homo sapiens
  Heavy chain CDR3 for antibody 593 (IGHV3-33)
ARDSSPGGQQTGWFDVFDI

SEQ ID NO: 1187 - protein, 9 aa, Homo sapiens
  Light chain CDR3 for antibody 594 (IGKV1-12)
QHANGFPWT

SEQ ID NO: 1188 - protein, 14 aa, Homo sapiens
  Heavy chain CDR3 for antibody 594 (IGHV3-30)
AKEASKRASRNFDF

SEQ ID NO: 1189 - protein, 9 aa, Homo sapiens
  Light chain CDR3 for antibody 595 (IGKV1-39)
QQSYSFPHT

SEQ ID NO: 1190 - protein, 11 aa, Homo sapiens
  Heavy chain CDR3 for antibody 595 (IGHV4-59)
ARWKFGRQFDF

SEQ ID NO: 1191 - protein, 9 aa, Homo sapiens
  Light chain CDR3 for antibody 596 (IGKV1-33)
RQYDAFPIT

SEQ ID NO: 1192 - protein, 15 aa, Homo sapiens
  Heavy chain CDR3 for antibody 596 (IGHV1-2)
ARGEIQTLRSMPSDY

SEQ ID NO: 1193 - protein, 9 aa, Homo sapiens
  Light chain CDR3 for antibody 597 (IGKV3-11)
QQRNIWPLT

SEQ ID NO: 1194 - protein, 13 aa, Homo sapiens
  Heavy chain CDR3 for antibody 597 (IGHV4-4)
ARVQWALYWYFDL

SEQ ID NO: 1195 - protein, 9 aa, Homo sapiens
  Light chain CDR3 for antibody 598 (IGKV1-12)
QQANSLPLT

SEQ ID NO: 1196 - protein, 15 aa, Homo sapiens
  Heavy chain CDR3 for antibody 598 (IGHV3-23)
AKGLHHGSGTYFPAS

SEQ ID NO: 1197 - protein, 9 aa, Homo sapiens
  Light chain CDR3 for antibody 599 (IGKV1-39)
QQSYSTPLT

SEQ ID NO: 1198 - protein, 14 aa, Homo sapiens
  Heavy chain CDR3 for antibody 599 (IGHV3-21)
AREPARPRGYYFDY

SEQ ID NO: 1199 - protein, 9 aa, Homo sapiens
  Light chain CDR3 for antibody 600 (IGKV1D-12)
QQGDSFPLT

SEQ ID NO: 1200 - protein, 13 aa, Homo sapiens
  Heavy chain CDR3 for antibody 600 (IGHV3-53)
ARERGDTAMAVGD

SEQ ID NO: 1201 - protein, 9 aa, Homo sapiens
  Light chain CDR3 for antibody 601 (IGKV3-20)
QQYGSSLYT

SEQ ID NO: 1202 - protein, 24 aa, Homo sapiens
  Heavy chain CDR3 for antibody 601 (IGHV1-46)
AGPITMVRGVIIPDYYYYYYGMDV

SEQ ID NO: 1203 - protein, 8 aa, Homo sapiens
  Light chain CDR3 for antibody 602 (IGKV3-20)
QQYGSSPT

SEQ ID NO: 1204 - protein, 16 aa, Homo sapiens
  Heavy chain CDR3 for antibody 602 (IGHV1-18)
ARANPGAVGYYYGMDV

SEQ ID NO: 1205 - protein, 9 aa, Homo sapiens
  Light chain CDR3 for antibody 603 (IGKV1-27)
QKYNTAPWT

SEQ ID NO: 1206 - protein, 16 aa, Homo sapiens
  Heavy chain CDR3 for antibody 603 (IGHV3-9)
AKAKRGTAMVSDGFNL

SEQ ID NO: 1207 - protein, 10 aa, Homo sapiens
  Light chain CDR3 for antibody 604 (IGKV1-39)
QQSYSTPPIT

SEQ ID NO: 1208 - protein, 20 aa, Homo sapiens
  Heavy chain CDR3 for antibody 604 (IGHV4-39)
ARTGHLIRFLEWLPINWFDP

SEQ ID NO: 1209 - protein, 9 aa, Homo sapiens
  Light chain CDR3 for antibody 605 (IGKV1-33)
QQYANFPLT

SEQ ID NO: 1210 - protein, 9 aa, Homo sapiens
  Heavy chain CDR3 for antibody 605 (IGHV4-59)
ARATNSFDP

SEQ ID NO: 1211 - protein, 11 aa, Homo sapiens
  Light chain CDR3 for antibody 606 (IGKV3-11)
QQRSNWPPRLT

SEQ ID NO: 1212 - protein, 15 aa, Homo sapiens
  Heavy chain CDR3 for antibody 606 (IGHV3-30)
AKGCPGGTNCFYFDF

SEQ ID NO: 1213 - protein, 10 aa, Homo sapiens
  Light chain CDR3 for antibody 607 (IGKV1-39)
QQSYSTPPWT

SEQ ID NO: 1214 - protein, 15 aa, Homo sapiens
  Heavy chain CDR3 for antibody 607 (IGHV1-46)
AGGDGGNFRADAFDI

SEQ ID NO: 1215 - protein, 10 aa, Homo sapiens
  Light chain CDR3 for antibody 608 (IGKV1-39)
QQSYSTPPWT

SEQ ID NO: 1216 - protein, 17 aa, Homo sapiens
  Heavy chain CDR3 for antibody 608 (IGHV3-13)
ARGVSSSWGYYYYYMDV

SEQ ID NO: 1217 - protein, 9 aa, Homo sapiens
  Light chain CDR3 for antibody 609 (IGKV1-12)
QEADGFPWA

SEQ ID NO: 1218 - protein, 12 aa, Homo sapiens
  Heavy chain CDR3 for antibody 609 (IGHV3-15)
TTSVGGNSGVDC

SEQ ID NO: 1219 - protein, 9 aa, Homo sapiens
  Light chain CDR3 for antibody 610 (IGKV2-30)
MQGSHWPPT

SEQ ID NO: 1220 - protein, 12 aa, Homo sapiens
  Heavy chain CDR3 for antibody 610 (IGHV3-23)
ANIPTLTTISDY

SEQ ID NO: 1221 - protein, 9 aa, Homo sapiens
  Light chain CDR3 for antibody 611 (IGKV1-33)
QQYDNLPLT

SEQ ID NO: 1222 - protein, 13 aa, Homo sapiens
  Heavy chain CDR3 for antibody 611 (IGHV1-69)
ARFPNAALRAFDI

SEQ ID NO: 1223 - protein, 9 aa, Homo sapiens
  Light chain CDR3 for antibody 612 (IGKV1-33)
QQYDNLPLT

SEQ ID NO: 1224 - protein, 9 aa, Homo sapiens
  Heavy chain CDR3 for antibody 612 (IGHV3-53)
ARESYGMDV

SEQ ID NO: 1225 - protein, 9 aa, Homo sapiens
  Light chain CDR3 for antibody 613 (IGKV3-11)
QQRSNWPRT

SEQ ID NO: 1226 - protein, 19 aa, Homo sapiens
  Heavy chain CDR3 for antibody 613 (IGHV4-31)
ASQGGDDYVWGSWGYGMDV

SEQ ID NO: 1227 - protein, 10 aa, Homo sapiens
  Light chain CDR3 for antibody 614 (IGKV1-5)
QQYHSYSPKT

SEQ ID NO: 1228 - protein, 18 aa, Homo sapiens
  Heavy chain CDR3 for antibody 614 (IGHV5-a)
ARPMRSSSSHFLSYGMDV

SEQ ID NO: 1229 - protein, 10 aa, Homo sapiens
  Light chain CDR3 for antibody 615 (IGKV1-39)
QQSYSTPPIT

SEQ ID NO: 1230 - protein, 12 aa, Homo sapiens
  Heavy chain CDR3 for antibody 615 (IGHV3-53)
ARDLGSVGATDY

SEQ ID NO: 1231 - protein, 10 aa, Homo sapiens
  Light chain CDR3 for antibody 616 (IGKV1-39)
QQSYSTPPIT

SEQ ID NO: 1232 - protein, 11 aa, Homo sapiens
  Heavy chain CDR3 for antibody 616 (IGHV4-30-2)
ARGTKVVTFDS

SEQ ID NO: 1233 - protein, 11 aa, Homo sapiens
  Light chain CDR3 for antibody 617 (IGKV3-15)
QQYNNWPPMYT

SEQ ID NO: 1234 - protein, 13 aa, Homo sapiens
  Heavy chain CDR3 for antibody 617 (IGHV3-53)
ARERGDTAMAVGD

SEQ ID NO: 1235 - protein, 9 aa, Homo sapiens
  Light chain CDR3 for antibody 618 (IGKV1-27)
QKYNSAPLT

SEQ ID NO: 1236 - protein, 13 aa, Homo sapiens
  Heavy chain CDR3 for antibody 618 (IGHV3-53)
ARERGDTAMAVGD

SEQ ID NO: 1237 - protein, 9 aa, Homo sapiens
  Light chain CDR3 for antibody 619 (IGKV1-12)
QQGNSFPPA

SEQ ID NO: 1238 - protein, 19 aa, Homo sapiens
  Heavy chain CDR3 for antibody 619 (IGHV1-69)
ARDRLRIQLSPHYYYYMDV

SEQ ID NO: 1239 - protein, 10 aa, Homo sapiens
  Light chain CDR3 for antibody 620 (IGKV3-20)
QQYGSSPPDT

SEQ ID NO: 1240 - protein, 19 aa, Homo sapiens
  Heavy chain CDR3 for antibody 620 (IGHV1-69)
ARDRLRIQLSPHYYYYMDV

SEQ ID NO: 1241 - protein, 9 aa, Homo sapiens
  Light chain CDR3 for antibody 621 (IGKV1-33)
QQYDNLPLT

SEQ ID NO: 1242 - protein, 12 aa, Homo sapiens
  Heavy chain CDR3 for antibody 621 (IGHV3-64)
ASLAGYSGYYDY

SEQ ID NO: 1243 - protein, 10 aa, Homo sapiens
  Light chain CDR3 for antibody 622 (IGKV1-39)
QQSYSTPPIT

SEQ ID NO: 1244 - protein, 13 aa, Homo sapiens
  Heavy chain CDR3 for antibody 622 (IGHV3-53)
ARERGDKDMEVGE

SEQ ID NO: 1245 - protein, 9 aa, Homo sapiens
  Light chain CDR3 for antibody 623 (IGKV3-20)
QQYGSSTET

SEQ ID NO: 1246 - protein, 26 aa, Homo sapiens
  Heavy chain CDR3 for antibody 623 (IGHV4-34)
ARGRITVVPAPILGVGPYYDCYYLDV

SEQ ID NO: 1247 - protein, 10 aa, Homo sapiens
  Light chain CDR3 for antibody 624 (IGKV1-39)
QQSYSTPPIT

SEQ ID NO: 1248 - protein, 19 aa, Homo sapiens
  Heavy chain CDR3 for antibody 624 (IGHV1-69)
ARAHRSSTSYRLGINWFDP

SEQ ID NO: 1249 - protein, 9 aa, Homo sapiens
  Light chain CDR3 for antibody 625 (IGKV1-9)
QQLNSYSYT

SEQ ID NO: 1250 - protein, 14 aa, Homo sapiens
  Heavy chain CDR3 for antibody 625 (IGHV3-30)
AKEATKRASRHFDF

SEQ ID NO: 1251 - protein, 9 aa, Homo sapiens
  Light chain CDR3 for antibody 626 (IGKV3-11)
QQRSDWPPT

SEQ ID NO: 1252 - protein, 13 aa, Homo sapiens
  Heavy chain CDR3 for antibody 626 (IGHV3-53)
ARERGDTAMAVGD

SEQ ID NO: 1253 - protein, 10 aa, Homo sapiens
  Light chain CDR3 for antibody 627 (IGKV1-39)
QQSYSTPPIT

SEQ ID NO: 1254 - protein, 13 aa, Homo sapiens
  Heavy chain CDR3 for antibody 627 (IGHVVISTA32)
SKGPGDTAMAVGD

SEQ ID NO: 1255 - protein, 10 aa, Homo sapiens
  Light chain CDR3 for antibody 628 (IGKV1-39)
QQSYSTPPIT

SEQ ID NO: 1256 - protein, 13 aa, Homo sapiens
  Heavy chain CDR3 for antibody 628 (IGHV3-53)
ARERGDTAIAVGH

SEQ ID NO: 1257 - protein, 8 aa, Homo sapiens
  Light chain CDR3 for antibody 629 (IGKV2D-28)
MQALQTIT

SEQ ID NO: 1258 - protein, 13 aa, Homo sapiens
  Heavy chain CDR3 for antibody 629 (IGHV3-53)
ARERGDTAMAVGD

SEQ ID NO: 1259 - protein, 9 aa, Homo sapiens
  Light chain CDR3 for antibody 630 (IGKV1-33)
QQYDNLPIT

SEQ ID NO: 1260 - protein, 11 aa, Homo sapiens
  Heavy chain CDR3 for antibody 630 (IGHV3-53)
ARDLGPYGMDV

SEQ ID NO: 1261 - protein, 8 aa, Homo sapiens
  Light chain CDR3 for antibody 631 (IGKV3-20)
QQYGSSPT

SEQ ID NO: 1262 - protein, 14 aa, Homo sapiens
  Heavy chain CDR3 for antibody 631 (IGHV3-30)
AKEATKRASRHFDF

SEQ ID NO: 1263 - protein, 8 aa, Homo sapiens
  Light chain CDR3 for antibody 632 (IGKV3-20)
QQYGSSPT

SEQ ID NO: 1264 - protein, 13 aa, Homo sapiens
  Heavy chain CDR3 for antibody 632 (IGHV1-69)
ARFPNAALRAFDI

SEQ ID NO: 1265 - protein, 9 aa, Homo sapiens
  Light chain CDR3 for antibody 633 (IGKV1-39)
QQSYSTPKT

SEQ ID NO: 1266 - protein, 9 aa, Homo sapiens
  Heavy chain CDR3 for antibody 633 (IGHV3-53)
ARESYGMDV

SEQ ID NO: 1267 - protein, 8 aa, Homo sapiens
  Light chain CDR3 for antibody 634 (IGKV3-20)
QQYGSSPT

SEQ ID NO: 1268 - protein, 11 aa, Homo sapiens
  Heavy chain CDR3 for antibody 634 (IGHV3-53)
ARDLGPYGMDV

SEQ ID NO: 1269 - protein, 9 aa, Homo sapiens
  Light chain CDR3 for antibody 635 (IGKV1-39)
QQSYSAPWT

SEQ ID NO: 1270 - protein, 18 aa, Homo sapiens
  Heavy chain CDR3 for antibody 635 (IGHV2-26)
ARSMSELRLWYFYYFMDV

SEQ ID NO: 1271 - protein, 10 aa, Homo sapiens
  Light chain CDR3 for antibody 636 (IGKV1-39)
QQSYSTPPIT

SEQ ID NO: 1272 - protein, 13 aa, Homo sapiens
  Heavy chain CDR3 for antibody 636 (IGHV3-53)
ARERRDASMAVGD

SEQ ID NO: 1273 - protein, 9 aa, Homo sapiens
  Light chain CDR3 for antibody 637 (IGKV1-33)
QQYDNLPLT

SEQ ID NO: 1274 - protein, 19 aa, Homo sapiens
  Heavy chain CDR3 for antibody 637 (IGHV1-69)
ARDRLRIQRAPRYYYYMDV

SEQ ID NO: 1275 - protein, 9 aa, Homo sapiens
  Light chain CDR3 for antibody 638 (IGKV1-5)
QQYNSYSWT

SEQ ID NO: 1276 - protein, 13 aa, Homo sapiens
  Heavy chain CDR3 for antibody 638 (IGHV3-53)
ARERGDTAMAVGD

SEQ ID NO: 1277 - protein, 9 aa, Homo sapiens
  Light chain CDR3 for antibody 639 (IGKV1-27)
QKYNSAPKT

SEQ ID NO: 1278 - protein, 12 aa, Homo sapiens
  Heavy chain CDR3 for antibody 639 (IGHV3-23)
ANIPTLTTISDY

SEQ ID NO: 1279 - protein, 10 aa, Homo sapiens
  Light chain CDR3 for antibody 640 (IGKV1-39)
QQSYSTPPIT

SEQ ID NO: 1280 - protein, 14 aa, Homo sapiens
  Heavy chain CDR3 for antibody 640 (IGHV3-30)
ARSRGGNYYYGMDV

SEQ ID NO: 1281 - protein, 8 aa, Homo sapiens
  Light chain CDR3 for antibody 641 (IGKV1-5)
QQYVSGWT

SEQ ID NO: 1282 - protein, 14 aa, Homo sapiens
  Heavy chain CDR3 for antibody 641 (IGHV4-59)
ARGSTHCGGDCYHD

SEQ ID NO: 1283 - protein, 9 aa, Homo sapiens
  Light chain CDR3 for antibody 642 (IGKV1-39)
QQSYSTPKT

SEQ ID NO: 1284 - protein, 14 aa, Homo sapiens
  Heavy chain CDR3 for antibody 642 (IGHV3-30)
AKEATKRASRHFDF

SEQ ID NO: 1285 - protein, 10 aa, Homo sapiens
  Light chain CDR3 for antibody 643 (IGKV2-30)
MQGTHWPPWT

SEQ ID NO: 1286 - protein, 13 aa, Homo sapiens
  Heavy chain CDR3 for antibody 643 (IGHV3-53)
ARERGDTAMAVGD

SEQ ID NO: 1287 - protein, 9 aa, Homo sapiens
  Light chain CDR3 for antibody 644 (IGKV1-33)
QQYDNLPLT

SEQ ID NO: 1288 - protein, 19 aa, Homo sapiens
  Heavy chain CDR3 for antibody 644 (IGHV1-69)
ARAHRSSTSYRLGINWFDP

SEQ ID NO: 1289 - protein, 9 aa, Homo sapiens
  Light chain CDR3 for antibody 645 (IGKV1-39)
QLSYSTPVA

SEQ ID NO: 1290 - protein, 14 aa, Homo sapiens
  Heavy chain CDR3 for antibody 645 (IGHV3-30)
AKEATKRASRHFDF

SEQ ID NO: 1291 - protein, 9 aa, Homo sapiens
  Light chain CDR3 for antibody 646 (IGKV1-12)
QEADGFPWA

SEQ ID NO: 1292 - protein, 11 aa, Homo sapiens
  Heavy chain CDR3 for antibody 646 (IGHV3-53)
ARDLQPYGMDV

SEQ ID NO: 1293 - protein, 10 aa, Homo sapiens
  Light chain CDR3 for antibody 647 (IGKV1-39)
QQSYSTPPIT

SEQ ID NO: 1294 - protein, 13 aa, Homo sapiens
  Heavy chain CDR3 for antibody 647 (IGHV3-53)
ARERGDTAMALGH

SEQ ID NO: 1295 - protein, 10 aa, Homo sapiens
  Light chain CDR3 for antibody 648 (IGKV1-39)
QQSYSTPPIT

SEQ ID NO: 1296 - protein, 13 aa, Homo sapiens
  Heavy chain CDR3 for antibody 648 (IGHV3-53)
ARERGHTAMPVGH

SEQ ID NO: 1297 - protein, 9 aa, Homo sapiens
  Light chain CDR3 for antibody 649 (IGKV1-33)
QQYDNLPIT

SEQ ID NO: 1298 - protein, 12 aa, Homo sapiens
  Heavy chain CDR3 for antibody 649 (IGHV3-53)
ARDLGSVGATDY

SEQ ID NO: 1299 - protein, 10 aa, Homo sapiens
  Light chain CDR3 for antibody 650 (IGKV1-39)
QQSYSTPPIT

SEQ ID NO: 1300 - protein, 11 aa, Homo sapiens
  Heavy chain CDR3 for antibody 650 (IGHV3-53)
ARDKWEGAFDI

SEQ ID NO: 1301 - protein, 10 aa, Homo sapiens
  Light chain CDR3 for antibody 651 (IGKV1-39)
QQSYSTPPIT

SEQ ID NO: 1302 - protein, 13 aa, Homo sapiens
  Heavy chain CDR3 for antibody 651 (IGHV3-53)
ARERGDTAKSVRY

SEQ ID NO: 1303 - protein, 10 aa, Homo sapiens
  Light chain CDR3 for antibody 652 (IGKV1-39)
HQSCSTPPIT

SEQ ID NO: 1304 - protein, 13 aa, Homo sapiens
  Heavy chain CDR3 for antibody 652 (IGHV3-53)
ARERGDTAMAVGD

SEQ ID NO: 1305 - protein, 8 aa, Homo sapiens
  Light chain CDR3 for antibody 653 (IGKV3-20)
QQYGSSPT

SEQ ID NO: 1306 - protein, 23 aa, Homo sapiens
  Heavy chain CDR3 for antibody 653 (IGHV1-8)
AGPITMVRGVIIPDYYYYYGMDV

SEQ ID NO: 1307 - protein, 10 aa, Homo sapiens
  Light chain CDR3 for antibody 654 (IGKV1-39)
QQSYSTPPIT

SEQ ID NO: 1308 - protein, 10 aa, Homo sapiens
  Heavy chain CDR3 for antibody 654 (IGHV4-39)
ARETESRGDY

SEQ ID NO: 1309 - protein, 9 aa, Homo sapiens
  Light chain CDR3 for antibody 655 (IGKV1-9)
QQLNSYPQT

SEQ ID NO: 1310 - protein, 12 aa, Homo sapiens
  Heavy chain CDR3 for antibody 655 (IGHV3-64)
ASLAGYSGYYDY

SEQ ID NO: 1311 - protein, 10 aa, Homo sapiens
  Light chain CDR3 for antibody 656 (IGKV1-39)
QQSYSTPRLP

SEQ ID NO: 1312 - protein, 13 aa, Homo sapiens
  Heavy chain CDR3 for antibody 656 (IGHV3-53)
ARERGDTAMAVGD

SEQ ID NO: 1313 - protein, 10 aa, Homo sapiens
  Light chain CDR3 for antibody 657 (IGKV1-39)
QQSYSTPPIT

SEQ ID NO: 1314 - protein, 13 aa, Homo sapiens
  Heavy chain CDR3 for antibody 657 (IGHV3-53)
ARELGDAAMAVED

SEQ ID NO: 1315 - protein, 10 aa, Homo sapiens
  Light chain CDR3 for antibody 658 (IGKV1-39)
QQSYSTPPIT

SEQ ID NO: 1316 - protein, 13 aa, Homo sapiens
  Heavy chain CDR3 for antibody 658 (IGHV3-66)
AREQGDTTIAVGD

SEQ ID NO: 1317 - protein, 9 aa, Homo sapiens
  Light chain CDR3 for antibody 659 (IGKV1-33)
QQYDNLPLT

SEQ ID NO: 1318 - protein, 13 aa, Homo sapiens
  Heavy chain CDR3 for antibody 659 (IGHV3-74)
VRDQYGENFYMDV

SEQ ID NO: 1319 - protein, 10 aa, Homo sapiens
  Light chain CDR3 for antibody 660 (IGKV3-20)
QQYGSSPPAP

SEQ ID NO: 1320 - protein, 20 aa, Homo sapiens
  Heavy chain CDR3 for antibody 660 (IGHV4-39)
ARTGHLIRFLEWLPINWFDP

SEQ ID NO: 1321 - protein, 10 aa, Homo sapiens
  Light chain CDR3 for antibody 661 (IGKV1-39)
QQSYSIPPIT

SEQ ID NO: 1322 - protein, 13 aa, Homo sapiens
  Heavy chain CDR3 for antibody 661 (IGHV3-53)
ARERGDTSMAFDD

SEQ ID NO: 1323 - protein, 10 aa, Homo sapiens
  Light chain CDR3 for antibody 662 (IGKV1-39)
QQSYSTPPIT

SEQ ID NO: 1324 - protein, 13 aa, Homo sapiens
  Heavy chain CDR3 for antibody 662 (IGHV3-53)
ARESGYTAKAVVD

SEQ ID NO: 1325 - protein, 9 aa, Homo sapiens
  Light chain CDR3 for antibody 663 (IGKV1-33)
QQYDNLPLT

SEQ ID NO: 1326 - protein, 13 aa, Homo sapiens
  Heavy chain CDR3 for antibody 663 (IGHV1-69)
ASCTNYYYYYMYV

SEQ ID NO: 1327 - protein, 10 aa, Homo sapiens
  Light chain CDR3 for antibody 664 (IGKV1-39)
QKINSTPPIT

SEQ ID NO: 1328 - protein, 13 aa, Homo sapiens
  Heavy chain CDR3 for antibody 664 (IGHV3-53)
ARERGDTAMAVGD

SEQ ID NO: 1329 - protein, 10 aa, Homo sapiens
  Light chain CDR3 for antibody 665 (IGKV1-39)
QQSYSTPPIT

SEQ ID NO: 1330 - protein, 13 aa, Homo sapiens
  Heavy chain CDR3 for antibody 665 (IGHV3-53)
AREQGYTAMAFGD

SEQ ID NO: 1331 - protein, 10 aa, Homo sapiens
  Light chain CDR3 for antibody 666 (IGKV1-39)
QQSYSTPPIT

SEQ ID NO: 1332 - protein, 13 aa, Homo sapiens
  Heavy chain CDR3 for antibody 666 (IGHV3-53)
ARERGDKAKAVGY

SEQ ID NO: 1333 - protein, 9 aa, Homo sapiens
  Light chain CDR3 for antibody 667 (IGKV3-20)
QQYGSSPQT

SEQ ID NO: 1334 - protein, 14 aa, Homo sapiens
  Heavy chain CDR3 for antibody 667 (IGHV3-30)
AKEATKRASRHFDF

SEQ ID NO: 1335 - protein, 9 aa, Homo sapiens
  Light chain CDR3 for antibody 668 (IGKV3-20)
QQYGSSPYT

SEQ ID NO: 1336 - protein, 19 aa, Homo sapiens
  Heavy chain CDR3 for antibody 668 (IGHV1-69)
ARAHRSSTSYRLGINWFDP

SEQ ID NO: 1337 - protein, 9 aa, Homo sapiens
  Light chain CDR3 for antibody 669 (IGKV1-33)
QQYDNLPLT

SEQ ID NO: 1338 - protein, 20 aa, Homo sapiens
  Heavy chain CDR3 for antibody 669 (IGHV4-39)
ARTGHLIRFLEWLPINWFDP

SEQ ID NO: 1339 - protein, 9 aa, Homo sapiens
  Light chain CDR3 for antibody 670 (IGKV3-20)
QQYGSSLYT

SEQ ID NO: 1340 - protein, 19 aa, Homo sapiens
  Heavy chain CDR3 for antibody 670 (IGHV1-2)
ARDRLRIQISPHYYYYMDV

SEQ ID NO: 1341 - protein, 10 aa, Homo sapiens
  Light chain CDR3 for antibody 671 (IGKV1-39)
QQSYSTPPIT

SEQ ID NO: 1342 - protein, 13 aa, Homo sapiens
  Heavy chain CDR3 for antibody 671 (IGHV3-53)
ARERGDTAKTIGD

SEQ ID NO: 1343 - protein, 9 aa, Homo sapiens
  Light chain CDR3 for antibody 672 (IGKV1-12)
QEADGFPWA

SEQ ID NO: 1344 - protein, 13 aa, Homo sapiens
  Heavy chain CDR3 for antibody 672 (IGHV4-31)
ARDYGGNSAQFGY

SEQ ID NO: 1345 - protein, 9 aa, Homo sapiens
  Light chain CDR3 for antibody 673 (IGKV1-33)
QQYDNLPLT

SEQ ID NO: 1346 - protein, 21 aa, Homo sapiens
  Heavy chain CDR3 for antibody 673 (IGHV1-69)
ARDRLRIQLSPHYYYYMAVGD

SEQ ID NO: 1347 - protein, 10 aa, Homo sapiens
  Light chain CDR3 for antibody 674 (IGKV1-39)
QQSYSTPPIT

SEQ ID NO: 1348 - protein, 13 aa, Homo sapiens
  Heavy chain CDR3 for antibody 674 (IGHV3-53)
ARERGDTDKAVED

SEQ ID NO: 1349 - protein, 10 aa, Homo sapiens
  Light chain CDR3 for antibody 675 (IGKV1-12)
QQVNSYPGPT

SEQ ID NO: 1350 - protein, 12 aa, Homo sapiens
  Heavy chain CDR3 for antibody 675 (IGHV3-66)
ARDLSAAGGFDY

SEQ ID NO: 1351 - protein, 9 aa, Homo sapiens
  Light chain CDR3 for antibody 676 (IGKV1-33)
QQYDNLPIT

SEQ ID NO: 1352 - protein, 14 aa, Homo sapiens
  Heavy chain CDR3 for antibody 676 (IGHV2-5)
AHRLSAMVSSYFDY

SEQ ID NO: 1353 - protein, 10 aa, Homo sapiens
  Light chain CDR3 for antibody 677 (IGKV1-39)
QQSYSTPPIT

SEQ ID NO: 1354 - protein, 13 aa, Homo sapiens
  Heavy chain CDR3 for antibody 677 (IGHV3-53)
ARERGHTAIALGD

SEQ ID NO: 1355 - protein, 10 aa, Homo sapiens
  Light chain CDR3 for antibody 678 (IGKV1-39)
QQSYSTPPIT

SEQ ID NO: 1356 - protein, 10 aa, Homo sapiens
  Heavy chain CDR3 for antibody 678 (IGHV6-1)
ARDWEYSLDY

SEQ ID NO: 1357 - protein, 9 aa, Homo sapiens
  Light chain CDR3 for antibody 679 (IGKV1-33)
QQYDNLPYS

SEQ ID NO: 1358 - protein, 16 aa, Homo sapiens
  Heavy chain CDR3 for antibody 679 (IGHV4-39)
VRPTMNTEGGVHWFDP

SEQ ID NO: 1359 - protein, 9 aa, Homo sapiens
  Light chain CDR3 for antibody 680 (IGKV1-9)
QQLNSYPYT

SEQ ID NO: 1360 - protein, 13 aa, Homo sapiens
  Heavy chain CDR3 for antibody 680 (IGHV5-51)
ARRYSGFHAELDY

SEQ ID NO: 1361 - protein, 9 aa, Homo sapiens
  Light chain CDR3 for antibody 681 (IGKV1-33)
QQYDNLPLT

SEQ ID NO: 1362 - protein, 19 aa, Homo sapiens
  Heavy chain CDR3 for antibody 681 (IGHV1-69)
ARDRVRIQVSPHYYYYMDV

SEQ ID NO: 1363 - protein, 9 aa, Homo sapiens
  Light chain CDR3 for antibody 682 (IGKV1-9)
QQLNSYPPP

SEQ ID NO: 1364 - protein, 9 aa, Homo sapiens
  Heavy chain CDR3 for antibody 682 (IGHV3-53)
ARESYGMDV

SEQ ID NO: 1365 - protein, 9 aa, Homo sapiens
  Light chain CDR3 for antibody 683 (IGKV3-20)
HQYAYAPLT

SEQ ID NO: 1366 - protein, 13 aa, Homo sapiens
  Heavy chain CDR3 for antibody 683 (IGHV3-53)
ARERGDTAMAVGD

SEQ ID NO: 1367 - protein, 9 aa, Homo sapiens
  Light chain CDR3 for antibody 684 (IGKV1-33)
QQYDNLPLT

SEQ ID NO: 1368 - protein, 11 aa, Homo sapiens
  Heavy chain CDR3 for antibody 684 (IGHV4-30-2)
ARGTKVVTFDS

SEQ ID NO: 1369 - protein, 9 aa, Homo sapiens
  Light chain CDR3 for antibody 685 (IGKV1-33)
QQYDNLPIT

SEQ ID NO: 1370 - protein, 18 aa, Homo sapiens
  Heavy chain CDR3 for antibody 685 (IGHV3-13)
ARGVSSSWGYYYYYYMDV

SEQ ID NO: 1371 - protein, 11 aa, Homo sapiens
  Light chain CDR3 for antibody 686 (IGKV3-15)
QQYNNWPPMYT

SEQ ID NO: 1372 - protein, 16 aa, Homo sapiens
  Heavy chain CDR3 for antibody 686 (IGHV1-18)
ARANPGAVGYYYGMDV

SEQ ID NO: 1373 - protein, 9 aa, Homo sapiens
  Light chain CDR3 for antibody 687 (IGKV1-9)
QQLNSYSYT

SEQ ID NO: 1374 - protein, 11 aa, Homo sapiens
  Heavy chain CDR3 for antibody 687 (IGHV3-53)
ARDLGAYGMDV

SEQ ID NO: 1375 - protein, 10 aa, Homo sapiens
  Light chain CDR3 for antibody 688 (IGKV1-39)
QQSYSTPPIT

SEQ ID NO: 1376 - protein, 18 aa, Homo sapiens
  Heavy chain CDR3 for antibody 688 (IGHV3-66)
ARYSSGWYRHPLPNGMDV

SEQ ID NO: 1377 - protein, 9 aa, Homo sapiens
  Light chain CDR3 for antibody 689 (IGKV1-33)
QQYDNLPLT

SEQ ID NO: 1378 - protein, 14 aa, Homo sapiens
  Heavy chain CDR3 for antibody 689 (IGHV1-2)
ARWWIWFGEFIMDV

SEQ ID NO: 1379 - protein, 10 aa, Homo sapiens
  Light chain CDR3 for antibody 690 (IGKV1-39)
QQSYSTPPIT

SEQ ID NO: 1380 - protein, 18 aa, Homo sapiens
  Heavy chain CDR3 for antibody 690 (IGHV4-4)
ARGEAADEVGHHYGALDY

SEQ ID NO: 1381 - protein, 10 aa, Homo sapiens
  Light chain CDR3 for antibody 691 (IGKV1-39)
QQSYSTPPIT

SEQ ID NO: 1382 - protein, 13 aa, Homo sapiens
  Heavy chain CDR3 for antibody 691 (IGHV3-53)
ARERGDAAVAVGA

SEQ ID NO: 1383 - protein, 9 aa, Homo sapiens
  Light chain CDR3 for antibody 692 (IGKV1-12)
QEADGFPWA

SEQ ID NO: 1384 - protein, 16 aa, Homo sapiens
  Heavy chain CDR3 for antibody 692 (IGHV1-18)
ARANPGAVGYYYGMDV

SEQ ID NO: 1385 - protein, 9 aa, Homo sapiens
  Light chain CDR3 for antibody 693 (IGKV1-9)
QQLTSYSYT

SEQ ID NO: 1386 - protein, 19 aa, Homo sapiens
  Heavy chain CDR3 for antibody 693 (IGHV3-53)
ARDRLRIQLSPHYYYYMDV

SEQ ID NO: 1387 - protein, 8 aa, Homo sapiens
  Light chain CDR3 for antibody 694 (IGKV3-15)
QQYNNWPT

SEQ ID NO: 1388 - protein, 15 aa, Homo sapiens
  Heavy chain CDR3 for antibody 694 (IGHV1-69)
ARGGDGYNLVAHYDY

SEQ ID NO: 1389 - protein, 9 aa, Homo sapiens
  Light chain CDR3 for antibody 695 (IGKV3-20)
QQYGSSLYT

SEQ ID NO: 1390 - protein, 19 aa, Homo sapiens
  Heavy chain CDR3 for antibody 695 (IGHV1-69)
ARAHRSSTSYRLGINWFDP

SEQ ID NO: 1391 - protein, 9 aa, Homo sapiens
  Light chain CDR3 for antibody 696 (IGKV1-39)
QQSYSTPGT

SEQ ID NO: 1392 - protein, 15 aa, Homo sapiens
  Heavy chain CDR3 for antibody 696 (IGHV3-64)
VKDVGWVVTVDAFDY

SEQ ID NO: 1393 - protein, 9 aa, Homo sapiens
  Light chain CDR3 for antibody 697 (IGKV1-9)
QQLNSYSYT

SEQ ID NO: 1394 - protein, 12 aa, Homo sapiens
  Heavy chain CDR3 for antibody 697 (IGHV3-53)
ARDLGSVGATDY

SEQ ID NO: 1395 - protein, 9 aa, Homo sapiens
  Light chain CDR3 for antibody 698 (IGKV1-9)
QQLNSYSYT

SEQ ID NO: 1396 - protein, 11 aa, Homo sapiens
  Heavy chain CDR3 for antibody 698 (IGHV3-53)
ARDGRGDLWSY

SEQ ID NO: 1397 - protein, 9 aa, Homo sapiens
  Light chain CDR3 for antibody 699 (IGKV1-39)
QQSYSTPPT

SEQ ID NO: 1398 - protein, 16 aa, Homo sapiens
  Heavy chain CDR3 for antibody 699 (IGHV1-18)
ARANPGAVGYYYGMDV

SEQ ID NO: 1399 - protein, 9 aa, Homo sapiens
  Light chain CDR3 for antibody 700 (IGKV3-20)
QQYGSSPLT

SEQ ID NO: 1400 - protein, 13 aa, Homo sapiens
  Heavy chain CDR3 for antibody 700 (IGHV4-31)
ARDYGGNSAQFGY

SEQ ID NO: 1401 - protein, 9 aa, Homo sapiens
  Light chain CDR3 for antibody 701 (IGKV1-9)
QQLNSYPQT

SEQ ID NO: 1402 - protein, 19 aa, Homo sapiens
  Heavy chain CDR3 for antibody 701 (IGHV1-69)
ARAHRSSTSYRLGINWFDP

SEQ ID NO: 1403 - protein, 9 aa, Homo sapiens
  Light chain CDR3 for antibody 702 (IGKV1-9)
QQLNSYSYT

SEQ ID NO: 1404 - protein, 11 aa, Homo sapiens
  Heavy chain CDR3 for antibody 702 (IGHV3-53)
ARDLGPYGMDV

SEQ ID NO: 1405 - protein, 9 aa, Homo sapiens
  Light chain CDR3 for antibody 703 (IGKV3-20)
QQYGSSLYT

SEQ ID NO: 1406 - protein, 11 aa, Homo sapiens
  Heavy chain CDR3 for antibody 703 (IGHV3-53)
ARDLQVYGMDV

SEQ ID NO: 1407 - protein, 8 aa, Homo sapiens
  Light chain CDR3 for antibody 704 (IGKV1-5)
QQYVTYPT

SEQ ID NO: 1408 - protein, 18 aa, Homo sapiens
  Heavy chain CDR3 for antibody 704 (IGHV4/OR15-8)
ARVDSAWAGTPRFWYFDL

SEQ ID NO: 1409 - protein, 9 aa, Homo sapiens
  Light chain CDR3 for antibody 705 (IGKV3-20)
QQYGSSLYT

SEQ ID NO: 1410 - protein, 9 aa, Homo sapiens
  Heavy chain CDR3 for antibody 705 (IGHV3-53)
ARESYGMDV

SEQ ID NO: 1411 - protein, 9 aa, Homo sapiens
  Light chain CDR3 for antibody 706 (IGKV1-9)
QQLNSYPQT

SEQ ID NO: 1412 - protein, 13 aa, Homo sapiens
  Heavy chain CDR3 for antibody 706 (IGHV4-31)
ARDYGGNSAQFGY

SEQ ID NO: 1413 - protein, 11 aa, Homo sapiens
  Light chain CDR3 for antibody 707 (IGKV3-15)
QQYNNWPPMYT

SEQ ID NO: 1414 - protein, 9 aa, Homo sapiens
  Heavy chain CDR3 for antibody 707 (IGHV3-53)
ARESYGMDV

SEQ ID NO: 1415 - protein, 11 aa, Homo sapiens
  Light chain CDR3 for antibody 708 (IGKV3-15)
QQYNNWPPMYT

SEQ ID NO: 1416 - protein, 11 aa, Homo sapiens
  Heavy chain CDR3 for antibody 708 (IGHV3-53)
ARDLQVYGMDV

SEQ ID NO: 1417 - protein, 9 aa, Homo sapiens
  Light chain CDR3 for antibody 709 (IGKV1-39)
QQSYSTPPT

SEQ ID NO: 1418 - protein, 11 aa, Homo sapiens
  Heavy chain CDR3 for antibody 709 (IGHV3-53)
ARDLQVYGMDV

SEQ ID NO: 1419 - protein, 9 aa, Homo sapiens
  Light chain CDR3 for antibody 710 (IGKV1-9)
QQSLTIPYT

SEQ ID NO: 1420 - protein, 9 aa, Homo sapiens
  Heavy chain CDR3 for antibody 710 (IGHV3-53)
ARESYGMDV

SEQ ID NO: 1421 - protein, 8 aa, Homo sapiens
  Light chain CDR3 for antibody 711 (IGKV1-33)
QQYDNLPS

SEQ ID NO: 1422 - protein, 19 aa, Homo sapiens
  Heavy chain CDR3 for antibody 711 (IGHV1-69)
ARAHRSSTSYRLGINWFDP

SEQ ID NO: 1423 - protein, 12 aa, Homo sapiens
  Light chain CDR3 for antibody 712 (IGKV3-11)
QQRSIWPPKPLT

SEQ ID NO: 1424 - protein, 11 aa, Homo sapiens
  Heavy chain CDR3 for antibody 712 (IGHV4-59)
ARLYGIESRDY

SEQ ID NO: 1425 - protein, 9 aa, Homo sapiens
  Light chain CDR3 for antibody 713 (IGKV1-39)
QQSYSTPPT

SEQ ID NO: 1426 - protein, 18 aa, Homo sapiens
  Heavy chain CDR3 for antibody 713 (IGHV1-69)
ARGAGIVGAIGRHSFFNY

SEQ ID NO: 1427 - protein, 9 aa, Homo sapiens
  Light chain CDR3 for antibody 714 (IGKV1-5)
YQYKGSLYT

SEQ ID NO: 1428 - protein, 11 aa, Homo sapiens
  Heavy chain CDR3 for antibody 714 (IGHV4/OR15-8)
ASRRITVCFDS

SEQ ID NO: 1429 - protein, 9 aa, Homo sapiens
  Light chain CDR3 for antibody 715 (IGKV3-20)
QQYGSSPLT

SEQ ID NO: 1430 - protein, 16 aa, Homo sapiens
  Heavy chain CDR3 for antibody 715 (IGHV4-31)
ARARITMIVVVSHFDY

SEQ ID NO: 1431 - protein, 9 aa, Homo sapiens
  Light chain CDR3 for antibody 716 (IGKV3-20)
QQYGSSLYT

SEQ ID NO: 1432 - protein, 12 aa, Homo sapiens
  Heavy chain CDR3 for antibody 716 (IGHV3-53)
ARDLGSVGATDY

SEQ ID NO: 1433 - protein, 8 aa, Homo sapiens
  Light chain CDR3 for antibody 717 (IGKV3-20)
QQYSSSLT

SEQ ID NO: 1434 - protein, 11 aa, Homo sapiens
  Heavy chain CDR3 for antibody 717 (IGHV1-24)
ATKGGLGELWY

SEQ ID NO: 1435 - protein, 9 aa, Homo sapiens
  Light chain CDR3 for antibody 718 (IGKV1-39)
QQSYSTLLT

SEQ ID NO: 1436 - protein, 13 aa, Homo sapiens
  Heavy chain CDR3 for antibody 718 (IGHV4-b)
ARSPRGDFYYFDY

SEQ ID NO: 1437 - protein, 9 aa, Homo sapiens
  Light chain CDR3 for antibody 719 (IGKV1-39)
QQSYSTLLT

SEQ ID NO: 1438 - protein, 19 aa, Homo sapiens
  Heavy chain CDR3 for antibody 719 (IGHV4/OR15-8)
ARDALGYCSGGRCYAAFDI

SEQ ID NO: 1439 - protein, 8 aa, Homo sapiens
  Light chain CDR3 for antibody 720 (IGKV1-33)
QQYDNLPS

SEQ ID NO: 1440 - protein, 16 aa, Homo sapiens
  Heavy chain CDR3 for antibody 720 (IGHV1-18)
ARANPGAVGYYYGMDV

SEQ ID NO: 1441 - protein, 9 aa, Homo sapiens
  Light chain CDR3 for antibody 721 (IGKV1-33)
QQYDNLPLT

SEQ ID NO: 1442 - protein, 12 aa, Homo sapiens
  Heavy chain CDR3 for antibody 721 (IGHV3-53)
ARDLGSVGATDY

SEQ ID NO: 1443 - protein, 9 aa, Homo sapiens
  Light chain CDR3 for antibody 722 (IGKV3-20)
QQYGSSPDT

SEQ ID NO: 1444 - protein, 11 aa, Homo sapiens
  Heavy chain CDR3 for antibody 722 (IGHV5-51)
ATLDYGGALPY

SEQ ID NO: 1445 - protein, 9 aa, Homo sapiens
  Light chain CDR3 for antibody 723 (IGKV3-20)
QQYGSSLYT

SEQ ID NO: 1446 - protein, 18 aa, Homo sapiens
  Heavy chain CDR3 for antibody 723 (IGHV1-69)
ARGAGIVGAIGRHSFFNY

SEQ ID NO: 1447 - protein, 8 aa, Homo sapiens
  Light chain CDR3 for antibody 724 (IGKV1-33)
QQYDNLPS

SEQ ID NO: 1448 - protein, 13 aa, Homo sapiens
  Heavy chain CDR3 for antibody 724 (IGHV4-31)
ARDYGGNSAQFGY

SEQ ID NO: 1449 - protein, 9 aa, Homo sapiens
  Light chain CDR3 for antibody 725 (IGKV1-39)
QQSYRTSWT

SEQ ID NO: 1450 - protein, 14 aa, Homo sapiens
  Heavy chain CDR3 for antibody 725 (IGHV4-30-2)
ARWSSNHFGALFDS

SEQ ID NO: 1451 - protein, 9 aa, Homo sapiens
  Light chain CDR3 for antibody 726 (IGKV1-33)
QQYDNLPLT

SEQ ID NO: 1452 - protein, 18 aa, Homo sapiens
  Heavy chain CDR3 for antibody 726 (IGHV1-69)
ARGAGIVGAIGRHSFFNY

SEQ ID NO: 1453 - protein, 8 aa, Homo sapiens
  Light chain CDR3 for antibody 727 (IGKV1-5)
QQYNSPYI

SEQ ID NO: 1454 - protein, 10 aa, Homo sapiens
  Heavy chain CDR3 for antibody 727 (IGHV3-53)
ARDRGDSFDI

SEQ ID NO: 1455 - protein, 9 aa, Homo sapiens
  Light chain CDR3 for antibody 728 (IGKV3-20)
QQYGSSPLT

SEQ ID NO: 1456 - protein, 17 aa, Homo sapiens
  Heavy chain CDR3 for antibody 728 (IGHV4-31)
ASANRHTIFGVVGPFDY

SEQ ID NO: 1457 - protein, 9 aa, Homo sapiens
  Light chain CDR3 for antibody 729 (IGKV1-39)
QQSYSTPPT

SEQ ID NO: 1458 - protein, 13 aa, Homo sapiens
  Heavy chain CDR3 for antibody 729 (IGHV4-31)
ARDYGGNSAQFGY

SEQ ID NO: 1459 - protein, 9 aa, Homo sapiens
  Light chain CDR3 for antibody 730 (IGKV1-5)
QHYKNYPLT

SEQ ID NO: 1460 - protein, 14 aa, Homo sapiens
  Heavy chain CDR3 for antibody 730 (IGHV3-72)
AGLVTSPPPYAMDV

SEQ ID NO: 1461 - protein, 9 aa, Homo sapiens
  Light chain CDR3 for antibody 731 (IGKV3-11)
QQRSNWPPT

SEQ ID NO: 1462 - protein, 14 aa, Homo sapiens
  Heavy chain CDR3 for antibody 731 (IGHV3-23)
AKDNAIPTVSWFDP

SEQ ID NO: 1463 - protein, 9 aa, Homo sapiens
  Light chain CDR3 for antibody 732 (IGKV1-16)
QQYNSYPFT

SEQ ID NO: 1464 - protein, 15 aa, Homo sapiens
  Heavy chain CDR3 for antibody 732 (IGHV1-46)
LRGGHHSGLGSPWGY

SEQ ID NO: 1465 - protein, 11 aa, Homo sapiens
  Light chain CDR3 for antibody 733 (IGKV3-15)
QQYNNWPPMYT

SEQ ID NO: 1466 - protein, 11 aa, Homo sapiens
  Heavy chain CDR3 for antibody 733 (IGHV3-53)
ARDGRGDLWSY

SEQ ID NO: 1467 - protein, 8 aa, Homo sapiens
  Light chain CDR3 for antibody 734 (IGKV1-33)
QQYDNLPS

SEQ ID NO: 1468 - protein, 11 aa, Homo sapiens
  Heavy chain CDR3 for antibody 734 (IGHV3-53)
ARDLQVYGMDV

SEQ ID NO: 1469 - protein, 9 aa, Homo sapiens
  Light chain CDR3 for antibody 735 (IGKV1-39)
QQSYSTPPT

SEQ ID NO: 1470 - protein, 11 aa, Homo sapiens
  Heavy chain CDR3 for antibody 735 (IGHV3-53)
ARDGRGDLWSY

SEQ ID NO: 1471 - protein, 8 aa, Homo sapiens
  Light chain CDR3 for antibody 736 (IGKV3-11)
QQRSNWLT

SEQ ID NO: 1472 - protein, 16 aa, Homo sapiens
  Heavy chain CDR3 for antibody 736 (IGHV4-31)
ARASRGIFGVVEWSDP

SEQ ID NO: 1473 - protein, 9 aa, Homo sapiens
  Light chain CDR3 for antibody 737 (IGKV2D-28)
MQALQTPPT

SEQ ID NO: 1474 - protein, 11 aa, Homo sapiens
  Heavy chain CDR3 for antibody 737 (IGHV1-69)
NGRGELGYFDY

SEQ ID NO: 1475 - protein, 8 aa, Homo sapiens
  Light chain CDR3 for antibody 738 (IGKV3-20)
QQYGSSPQ

SEQ ID NO: 1476 - protein, 22 aa, Homo sapiens
  Heavy chain CDR3 for antibody 738 (IGHV1-f)
VRGSSGWTKWGVGPYYYYFMDV

SEQ ID NO: 1477 - protein, 9 aa, Homo sapiens
  Light chain CDR3 for antibody 739 (IGKV3-20)
QQYGSSPLT

SEQ ID NO: 1478 - protein, 11 aa, Homo sapiens
  Heavy chain CDR3 for antibody 739 (IGHV3-53)
ARDGRGDLWSY

SEQ ID NO: 1479 - protein, 11 aa, Homo sapiens
  Light chain CDR3 for antibody 740 (IGKV3-15)
QQYNNWPPMYT

SEQ ID NO: 1480 - protein, 19 aa, Homo sapiens
  Heavy chain CDR3 for antibody 740 (IGHV1-69)
ARAHRSSTSYRLGINWFDP

SEQ ID NO: 1481 - protein, 9 aa, Homo sapiens
  Light chain CDR3 for antibody 741 (IGKV1-39)
QQSYSTPIT

SEQ ID NO: 1482 - protein, 9 aa, Homo sapiens
  Heavy chain CDR3 for antibody 741 (IGHV5-51)
ARLIELADY

SEQ ID NO: 1483 - protein, 9 aa, Homo sapiens
  Light chain CDR3 for antibody 742 (IGKV1-39)
QQSYSTPPT

SEQ ID NO: 1484 - protein, 20 aa, Homo sapiens
  Heavy chain CDR3 for antibody 742 (IGHV4-39)
ARTGHLIRFLEWLPINWFDP

SEQ ID NO: 1485 - protein, 8 aa, Homo sapiens
  Light chain CDR3 for antibody 743 (IGKV1-39)
QQTFSGGS

SEQ ID NO: 1486 - protein, 17 aa, Homo sapiens
  Heavy chain CDR3 for antibody 743 (IGHV1/OR15-1)
ATGPPGGSSSAGYYLDS

SEQ ID NO: 1487 - protein, 9 aa, Homo sapiens
  Light chain CDR3 for antibody 744 (IGKV1-39)
QQSYSTPPT

SEQ ID NO: 1488 - protein, 12 aa, Homo sapiens
  Heavy chain CDR3 for antibody 744 (IGHV3-53)
ARDLGSVGATDY

SEQ ID NO: 1489 - protein, 9 aa, Homo sapiens
  Light chain CDR3 for antibody 745 (IGKV1-9)
QQLNSYPPP

SEQ ID NO: 1490 - protein, 12 aa, Homo sapiens
  Heavy chain CDR3 for antibody 745 (IGHV3-53)
ARDLGSVGATDY

SEQ ID NO: 1491 - protein, 9 aa, Homo sapiens
  Light chain CDR3 for antibody 746 (IGKV3-20)
QQYGSSPQT

SEQ ID NO: 1492 - protein, 11 aa, Homo sapiens
  Heavy chain CDR3 for antibody 746 (IGHV6-1)
SRVVAAAGTDY

SEQ ID NO: 1493 - protein, 11 aa, Homo sapiens
  Light chain CDR3 for antibody 747 (IGKV3-15)
QQYNNWPPMYT

SEQ ID NO: 1494 - protein, 13 aa, Homo sapiens
  Heavy chain CDR3 for antibody 747 (IGHV4-31)
ARDYGGNSAQFGY

SEQ ID NO: 1495 - protein, 10 aa, Homo sapiens
  Light chain CDR3 for antibody 748 (IGKV3-11)
QQRSNWPPLT

SEQ ID NO: 1496 - protein, 14 aa, Homo sapiens
  Heavy chain CDR3 for antibody 748 (IGHV1-8)
ARGFGGWGNYYMDV

SEQ ID NO: 1497 - protein, 10 aa, Homo sapiens
  Light chain CDR3 for antibody 749 (IGKV3-11)
QQRSTWPPYT

SEQ ID NO: 1498 - protein, 11 aa, Homo sapiens
  Heavy chain CDR3 for antibody 749 (IGHV1-2)
VKGRRGYSAEY

SEQ ID NO: 1499 - protein, 8 aa, Homo sapiens
  Light chain CDR3 for antibody 750 (IGKV3-15)
QQYIKLLS

SEQ ID NO: 1500 - protein, 12 aa, Homo sapiens
  Heavy chain CDR3 for antibody 750 (IGHV3-73)
SRGSEGNWFYDL

SEQ ID NO: 1501 - protein, 9 aa, Homo sapiens
  Light chain CDR3 for antibody 751 (IGKV1-9)
QQLNSYPPP

SEQ ID NO: 1502 - protein, 11 aa, Homo sapiens
  Heavy chain CDR3 for antibody 751 (IGHV3-53)
ARDGRGDLWSY

SEQ ID NO: 1503 - protein, 9 aa, Homo sapiens
  Light chain CDR3 for antibody 752 (IGKV1-17)
LQHNSYPLT

SEQ ID NO: 1504 - protein, 14 aa, Homo sapiens
  Heavy chain CDR3 for antibody 752 (IGHV1-18)
ATGPVVVGPDYFDS

SEQ ID NO: 1505 - protein, 9 aa, Homo sapiens
  Light chain CDR3 for antibody 753 (IGKV1-33)
QQYDNLPPT

SEQ ID NO: 1506 - protein, 16 aa, Homo sapiens
  Heavy chain CDR3 for antibody 753 (IGHV5-51)
ARPFTSGSSGWYAIDY

SEQ ID NO: 1507 - protein, 9 aa, Homo sapiens
  Light chain CDR3 for antibody 754 (IGKV1-9)
QQLTSYSYT

SEQ ID NO: 1508 - protein, 19 aa, Homo sapiens
  Heavy chain CDR3 for antibody 754 (IGHV1-69)
ARAHRSSTSYRLGINWFDP

SEQ ID NO: 1509 - protein, 9 aa, Homo sapiens
  Light chain CDR3 for antibody 755 (IGKV3-20)
QQYGSSPWT

SEQ ID NO: 1510 - protein, 6 aa, Homo sapiens
  Heavy chain CDR3 for antibody 755 (IGHV4-59)
AREFDY

SEQ ID NO: 1511 - protein, 6 aa, Homo sapiens
  Light chain CDR3 for antibody 756 (IGKV3-20)
QQYGST

SEQ ID NO: 1512 - protein, 16 aa, Homo sapiens
  Heavy chain CDR3 for antibody 756 (IGHV5-a)
ARHWSPVVVRGSEPDY

SEQ ID NO: 1513 - protein, 9 aa, Homo sapiens
  Light chain CDR3 for antibody 757 (IGKV1-39)
QQTNSLPRT

SEQ ID NO: 1514 - protein, 20 aa, Homo sapiens
  Heavy chain CDR3 for antibody 757 (IGHV4-34)
ARGIPGGISPTGAPLSWLDP

SEQ ID NO: 1515 - protein, 11 aa, Homo sapiens
  Light chain CDR3 for antibody 758 (IGKV3-15)
QQYNNWPPMYT

SEQ ID NO: 1516 - protein, 20 aa, Homo sapiens
  Heavy chain CDR3 for antibody 758 (IGHV4-39)
ARTGHLIRFLEWLPINWFDP

SEQ ID NO: 1517 - protein, 9 aa, Homo sapiens
  Light chain CDR3 for antibody 759 (IGKV1-9)
QQLNSYPQT

SEQ ID NO: 1518 - protein, 18 aa, Homo sapiens
  Heavy chain CDR3 for antibody 759 (IGHV1-69)
ARGAGIVGAIGRHSFFNY

SEQ ID NO: 1519 - protein, 9 aa, Homo sapiens
  Light chain CDR3 for antibody 760 (IGKV3-20)
QQYGSSLYT

SEQ ID NO: 1520 - protein, 13 aa, Homo sapiens
  Heavy chain CDR3 for antibody 760 (IGHV5-51)
ARRYSGFHAELDY

SEQ ID NO: 1521 - protein, 9 aa, Homo sapiens
  Light chain CDR3 for antibody 761 (IGKV1-16)
QQYNSYPLT

SEQ ID NO: 1522 - protein, 22 aa, Homo sapiens
  Heavy chain CDR3 for antibody 761 (IGHV4-34)
ARGRYSSSWYDRVSYYYYGMDV

SEQ ID NO: 1523 - protein, 9 aa, Homo sapiens
  Light chain CDR3 for antibody 762 (IGKV3-20)
QQYGSSLWT

SEQ ID NO: 1524 - protein, 13 aa, Homo sapiens
  Heavy chain CDR3 for antibody 762 (IGHV2-70)
ARIGIQLWPHFDY

SEQ ID NO: 1525 - protein, 11 aa, Homo sapiens
  Light chain CDR3 for antibody 763 (IGKV3-20)
QLFTNSPPMYT

SEQ ID NO: 1526 - protein, 10 aa, Homo sapiens
  Heavy chain CDR3 for antibody 763 (IGHV4-30-2)
ARNGGYDQDI

SEQ ID NO: 1527 - protein, 9 aa, Homo sapiens
  Light chain CDR3 for antibody 764 (IGKV3-20)
QQYGSSPLT

SEQ ID NO: 1528 - protein, 16 aa, Homo sapiens
  Heavy chain CDR3 for antibody 764 (IGHV4-31)
ARGHTIFGVVANPFDY

SEQ ID NO: 1529 - protein, 9 aa, Homo sapiens
  Light chain CDR3 for antibody 765 (IGKV1-12)
QQANSFPYT

SEQ ID NO: 1530 - protein, 11 aa, Homo sapiens
  Heavy chain CDR3 for antibody 765 (IGHV3-53)
ARDLGPYGMDV

SEQ ID NO: 1531 - protein, 9 aa, Homo sapiens
  Light chain CDR3 for antibody 766 (IGKV1D-17)
LQHYTYPFT

SEQ ID NO: 1532 - protein, 16 aa, Homo sapiens
  Heavy chain CDR3 for antibody 766 (IGHV3-21)
TTDRPGFCSDGSCWET

SEQ ID NO: 1533 - protein, 9 aa, Homo sapiens
  Light chain CDR3 for antibody 767 (IGKV1-9)
QQLNSYPPP

SEQ ID NO: 1534 - protein, 16 aa, Homo sapiens
  Heavy chain CDR3 for antibody 767 (IGHV1-18)
ARANPGAVGYYYGMDV

SEQ ID NO: 1535 - protein, 9 aa, Homo sapiens
  Light chain CDR3 for antibody 768 (IGKV1-39)
QQSHATPWA

SEQ ID NO: 1536 - protein, 11 aa, Homo sapiens
  Heavy chain CDR3 for antibody 768 (IGHV4-28)
ARAYGKVAFDY

SEQ ID NO: 1537 - protein, 8 aa, Homo sapiens
  Light chain CDR3 for antibody 769 (IGKV1-9)
QQLNSYPA

SEQ ID NO: 1538 - protein, 18 aa, Homo sapiens
  Heavy chain CDR3 for antibody 769 (IGHV1-69)
ARGGWSSSSGLNYYGMDV

SEQ ID NO: 1539 - protein, 9 aa, Homo sapiens
  Light chain CDR3 for antibody 770 (IGKV3-20)
QQYGSSPWT

SEQ ID NO: 1540 - protein, 16 aa, Homo sapiens
  Heavy chain CDR3 for antibody 770 (IGHV4-34)
ARVPYRAASRNGAFDI

SEQ ID NO: 1541 - protein, 9 aa, Homo sapiens
  Light chain CDR3 for antibody 771 (IGKV1-5)
QQYNSYPWT

SEQ ID NO: 1542 - protein, 12 aa, Homo sapiens
  Heavy chain CDR3 for antibody 771 (IGHV3-33)
ARCLSYYYGMDV

SEQ ID NO: 1543 - protein, 9 aa, Homo sapiens
  Light chain CDR3 for antibody 772 (IGKV3-11)
QQRRNWPLT

SEQ ID NO: 1544 - protein, 14 aa, Homo sapiens
  Heavy chain CDR3 for antibody 772 (IGHV3-30)
ARVGYGNYYYGMDV

SEQ ID NO: 1545 - protein, 8 aa, Homo sapiens
  Light chain CDR3 for antibody 773 (IGKV1-33)
QQYDNLPS

SEQ ID NO: 1546 - protein, 9 aa, Homo sapiens
  Heavy chain CDR3 for antibody 773 (IGHV3-53)
ARESYGMDV

SEQ ID NO: 1547 - protein, 9 aa, Homo sapiens
  Light chain CDR3 for antibody 774 (IGKV1-12)
QQANSFPIT

SEQ ID NO: 1548 - protein, 14 aa, Homo sapiens
  Heavy chain CDR3 for antibody 774 (IGHV3-49)
TTTANWGFRWYFDL

SEQ ID NO: 1549 - protein, 9 aa, Homo sapiens
  Light chain CDR3 for antibody 775 (IGKV1-33)
QQYDNLPLT

SEQ ID NO: 1550 - protein, 17 aa, Homo sapiens
  Heavy chain CDR3 for antibody 775 (IGHV4-31)
ASANRHTIFGVVGPFDY

SEQ ID NO: 1551 - protein, 9 aa, Homo sapiens
  Light chain CDR3 for antibody 776 (IGKV3-11)
QQRSNWPRT

SEQ ID NO: 1552 - protein, 23 aa, Homo sapiens
  Heavy chain CDR3 for antibody 776 (IGHV1-8)
ARVRARFTMIVVVPHYYYYGMDV

SEQ ID NO: 1553 - protein, 9 aa, Homo sapiens
  Light chain CDR3 for antibody 777 (IGKV2D-28)
MQALQTLFT

SEQ ID NO: 1554 - protein, 13 aa, Homo sapiens
  Heavy chain CDR3 for antibody 777 (IGHV2-5)
AHSRAWFGEPVSY

SEQ ID NO: 1555 - protein, 9 aa, Homo sapiens
  Light chain CDR3 for antibody 778 (IGKV1-39)
QQTNSLPRT

SEQ ID NO: 1556 - protein, 13 aa, Homo sapiens
  Heavy chain CDR3 for antibody 778 (IGHV3-15)
STEAYYEPNIVHG

SEQ ID NO: 1557 - protein, 9 aa, Homo sapiens
  Light chain CDR3 for antibody 779 (IGKV2D-28)
MQGLEAPWT

SEQ ID NO: 1558 - protein, 16 aa, Homo sapiens
  Heavy chain CDR3 for antibody 779 (IGHV3-74)
ARGQRDPNYHYHGADV

SEQ ID NO: 1559 - protein, 8 aa, Homo sapiens
  Light chain CDR3 for antibody 780 (IGKV1-33)
QQYDNLPS

SEQ ID NO: 1560 - protein, 11 aa, Homo sapiens
  Heavy chain CDR3 for antibody 780 (IGHV3-53)
ARDGRGDLWSY

SEQ ID NO: 1561 - protein, 10 aa, Homo sapiens
  Light chain CDR3 for antibody 781 (IGKV1-39)
QQSYSTPPWT

SEQ ID NO: 1562 - protein, 16 aa, Homo sapiens
  Heavy chain CDR3 for antibody 781 (IGHV3-13)
ARGRTPAASFYYYMDV

SEQ ID NO: 1563 - protein, 9 aa, Homo sapiens
  Light chain CDR3 for antibody 782 (IGKV3-20)
QQYGSSLYT

SEQ ID NO: 1564 - protein, 19 aa, Homo sapiens
  Heavy chain CDR3 for antibody 782 (IGHV1-58)
AANRPVDTAMVTYYYGMDV

SEQ ID NO: 1565 - protein, 9 aa, Homo sapiens
  Light chain CDR3 for antibody 783 (IGKV1-9)
QQLNSYSYT

SEQ ID NO: 1566 - protein, 14 aa, Homo sapiens
  Heavy chain CDR3 for antibody 783 (IGHV3-23)
AKALAAAGYDAFDI

SEQ ID NO: 1567 - protein, 10 aa, Homo sapiens
  Light chain CDR3 for antibody 784 (IGKV1-39)
QQSYSTPALT

SEQ ID NO: 1568 - protein, 22 aa, Homo sapiens
  Heavy chain CDR3 for antibody 784 (IGHV1-18)
ARDQGNWNYVGWGIQQYNWFDP

SEQ ID NO: 1569 - protein, 9 aa, Homo sapiens
  Light chain CDR3 for antibody 785 (IGKV3-20)
QQYGSSPLT

SEQ ID NO: 1570 - protein, 16 aa, Homo sapiens
  Heavy chain CDR3 for antibody 785 (IGHV1-18)
ARANPGAVGYYYGMDV

SEQ ID NO: 1571 - protein, 10 aa, Homo sapiens
  Light chain CDR3 for antibody 786 (IGKV3-11)
QQRSNWPPPT

SEQ ID NO: 1572 - protein, 12 aa, Homo sapiens
  Heavy chain CDR3 for antibody 786 (IGHV3-21)
ARGAYGKGPFEY

SEQ ID NO: 1573 - protein, 9 aa, Homo sapiens
  Light chain CDR3 for antibody 787 (IGKV1D-12)
QQASSFPYT

SEQ ID NO: 1574 - protein, 20 aa, Homo sapiens
  Heavy chain CDR3 for antibody 787 (IGHV3-48)
ARRPDFDFWSGTTLAYGMDV

SEQ ID NO: 1575 - protein, 9 aa, Homo sapiens
  Light chain CDR3 for antibody 788 (IGKV3-20)
QQYGNSPWA

SEQ ID NO: 1576 - protein, 7 aa, Homo sapiens
  Heavy chain CDR3 for antibody 788 (IGHV3-15)
RGSYLGN

SEQ ID NO: 1577 - protein, 9 aa, Homo sapiens
  Light chain CDR3 for antibody 789 (IGKV3-11)
QQRSDWRLT

SEQ ID NO: 1578 - protein, 16 aa, Homo sapiens
  Heavy chain CDR3 for antibody 789 (IGHV1-69)
ASDILRPRGAGYYFDD

SEQ ID NO: 1579 - protein, 9 aa, Homo sapiens
  Light chain CDR3 for antibody 790 (IGKV1-NL1)
QQYYSTPWT

SEQ ID NO: 1580 - protein, 13 aa, Homo sapiens
  Heavy chain CDR3 for antibody 790 (IGHV3-9)
AKGYGFTTYYMDV

SEQ ID NO: 1581 - protein, 9 aa, Homo sapiens
  Light chain CDR3 for antibody 791 (IGKV3-20)
QEHGGSLYT

SEQ ID NO: 1582 - protein, 14 aa, Homo sapiens
  Heavy chain CDR3 for antibody 791 (IGHV5-a)
AIWRGIFYYYGMDV

SEQ ID NO: 1583 - protein, 9 aa, Homo sapiens
  Light chain CDR3 for antibody 792 (IGKV1-12)
QQANSFPIT

SEQ ID NO: 1584 - protein, 16 aa, Homo sapiens
  Heavy chain CDR3 for antibody 792 (IGHV1-18)
ARTWIQLYYYYYYMDV

SEQ ID NO: 1585 - protein, 10 aa, Homo sapiens
  Light chain CDR3 for antibody 793 (IGKV3-11)
QQRDNWPPIT

SEQ ID NO: 1586 - protein, 16 aa, Homo sapiens
  Heavy chain CDR3 for antibody 793 (IGHV3-33)
VGDSGVAGRRGNYFDP

SEQ ID NO: 1587 - protein, 8 aa, Homo sapiens
  Light chain CDR3 for antibody 794 (IGKV3-20)
QQYGSSPP

SEQ ID NO: 1588 - protein, 19 aa, Homo sapiens
  Heavy chain CDR3 for antibody 794 (IGHV1-69)
ARGGWGTVVTPRGYYYMDV

SEQ ID NO: 1589 - protein, 9 aa, Homo sapiens
  Light chain CDR3 for antibody 795 (IGKV3-20)
QQYGSSPWT

SEQ ID NO: 1590 - protein, 18 aa, Homo sapiens
  Heavy chain CDR3 for antibody 795 (IGHV4-34)
ARGRAVTTFFMSDNWFDP

SEQ ID NO: 1591 - protein, 11 aa, Homo sapiens
  Light chain CDR3 for antibody 796 (IGKV3-15)
QQYNNWPPVYT

SEQ ID NO: 1592 - protein, 9 aa, Homo sapiens
  Heavy chain CDR3 for antibody 796 (IGHV4/OR15-8)
ARRWGSSDV

SEQ ID NO: 1593 - protein, 10 aa, Homo sapiens
  Light chain CDR3 for antibody 797 (IGKV3-20)
QQYGSSPPDT

SEQ ID NO: 1594 - protein, 16 aa, Homo sapiens
  Heavy chain CDR3 for antibody 797 (IGHV1-18)
ARANPGAVGYYYGMDV

SEQ ID NO: 1595 - protein, 9 aa, Homo sapiens
  Light chain CDR3 for antibody 798 (IGKV1-6)
LQDYNDPPT

SEQ ID NO: 1596 - protein, 13 aa, Homo sapiens
  Heavy chain CDR3 for antibody 798 (IGHV3-53)
ARDTRHMGGGADV

SEQ ID NO: 1597 - protein, 10 aa, Homo sapiens
  Light chain CDR3 for antibody 799 (IGKV1-33)
QQYDNLPRLT

SEQ ID NO: 1598 - protein, 13 aa, Homo sapiens
  Heavy chain CDR3 for antibody 799 (IGHV5-51)
ARRSMIVVDAFDI

SEQ ID NO: 1599 - protein, 8 aa, Homo sapiens
  Light chain CDR3 for antibody 800 (IGKV3-15)
QQYNNWPT

SEQ ID NO: 1600 - protein, 19 aa, Homo sapiens
  Heavy chain CDR3 for antibody 800 (IGHV1-69)
ARAHRSSTSYRLGINWFDP

SEQ ID NO: 1601 - protein, 9 aa, Homo sapiens
  Light chain CDR3 for antibody 801 (IGKV1-9)
QQLNSYSYT

SEQ ID NO: 1602 - protein, 13 aa, Homo sapiens
  Heavy chain CDR3 for antibody 801 (IGHV5-51)
ARRYSGFHAELDY

SEQ ID NO: 1603 - protein, 9 aa, Homo sapiens
  Light chain CDR3 for antibody 802 (IGKV1-9)
QQLNSYSYT

SEQ ID NO: 1604 - protein, 12 aa, Homo sapiens
  Heavy chain CDR3 for antibody 802 (IGHV2-5)
GYRGGARAWFGP

SEQ ID NO: 1605 - protein, 9 aa, Homo sapiens
  Light chain CDR3 for antibody 803 (IGKV3-20)
QHYGSSPWT

SEQ ID NO: 1606 - protein, 13 aa, Homo sapiens
  Heavy chain CDR3 for antibody 803 (IGHV2-26)
ARASYSAAGLFDS

SEQ ID NO: 1607 - protein, 9 aa, Homo sapiens
  Light chain CDR3 for antibody 804 (IGKV1-27)
QKYNTFSWT

SEQ ID NO: 1608 - protein, 13 aa, Homo sapiens
  Heavy chain CDR3 for antibody 804 (IGHV1-69)
ARPVVGSGSNFDY

SEQ ID NO: 1609 - protein, 9 aa, Homo sapiens
  Light chain CDR3 for antibody 805 (IGKV3-11)
QQRRNWPLT

SEQ ID NO: 1610 - protein, 11 aa, Homo sapiens
  Heavy chain CDR3 for antibody 805 (IGHV3-53)
ARDLQVYGMDV

SEQ ID NO: 1611 - protein, 9 aa, Homo sapiens
  Light chain CDR3 for antibody 806 (IGKV3-20)
QEHGGSLYT

SEQ ID NO: 1612 - protein, 12 aa, Homo sapiens
  Heavy chain CDR3 for antibody 806 (IGHV1-2)
ARGNANWRPFDH

SEQ ID NO: 1613 - protein, 9 aa, Homo sapiens
  Light chain CDR3 for antibody 807 (IGKV1-6)
LQDYNYPRT

SEQ ID NO: 1614 - protein, 8 aa, Homo sapiens
  Heavy chain CDR3 for antibody 807 (IGHV4-34)
ARTGGMDV

SEQ ID NO: 1615 - protein, 9 aa, Homo sapiens
  Light chain CDR3 for antibody 808 (IGKV1-39)
QQSYSTLLT

SEQ ID NO: 1616 - protein, 10 aa, Homo sapiens
  Heavy chain CDR3 for antibody 808 (IGHV3-53)
ARDRGDSFDI

SEQ ID NO: 1617 - protein, 9 aa, Homo sapiens
  Light chain CDR3 for antibody 809 (IGKV1-39)
QQSYSTPGT

SEQ ID NO: 1618 - protein, 11 aa, Homo sapiens
  Heavy chain CDR3 for antibody 809 (IGHV3-53)
ARDLGPYGMDV

SEQ ID NO: 1619 - protein, 9 aa, Homo sapiens
  Light chain CDR3 for antibody 810 (IGKV3-11)
QHRNEVPLT

SEQ ID NO: 1620 - protein, 10 aa, Homo sapiens
  Heavy chain CDR3 for antibody 810 (IGHV4-39)
ARDAGGSGNN

SEQ ID NO: 1621 - protein, 9 aa, Homo sapiens
  Light chain CDR3 for antibody 811 (IGKV3-20)
QQYGSSLYT

SEQ ID NO: 1622 - protein, 15 aa, Homo sapiens
  Heavy chain CDR3 for antibody 811 (IGHV1-69)
ARGGDGYNLVAHYDY

SEQ ID NO: 1623 - protein, 9 aa, Homo sapiens
  Light chain CDR3 for antibody 812 (IGKV1-39)
QQSYSTPPT

SEQ ID NO: 1624 - protein, 13 aa, Homo sapiens
  Heavy chain CDR3 for antibody 812 (IGHV5-51)
ARRYSGFHAELDY

SEQ ID NO: 1625 - protein, 9 aa, Homo sapiens
  Light chain CDR3 for antibody 813 (IGKV1-39)
QQSYSTPPT

SEQ ID NO: 1626 - protein, 19 aa, Homo sapiens
  Heavy chain CDR3 for antibody 813 (IGHV1-69)
ARAHRSSTGCRLGINWFDA

SEQ ID NO: 1627 - protein, 8 aa, Homo sapiens
  Light chain CDR3 for antibody 814 (IGKV3-11)
QQRIYWWT

SEQ ID NO: 1628 - protein, 17 aa, Homo sapiens
  Heavy chain CDR3 for antibody 814 (IGHV3-66)
AREDWNDRDVRYDWFDP

SEQ ID NO: 1629 - protein, 9 aa, Homo sapiens
  Light chain CDR3 for antibody 815 (IGKV3-11)
QQRRNWPLT

SEQ ID NO: 1630 - protein, 9 aa, Homo sapiens
  Heavy chain CDR3 for antibody 815 (IGHV3-53)
ARESYGMDV

SEQ ID NO: 1631 - protein, 8 aa, Homo sapiens
  Light chain CDR3 for antibody 816 (IGKV1-33)
QQYDNLPL

SEQ ID NO: 1632 - protein, 15 aa, Homo sapiens
  Heavy chain CDR3 for antibody 816 (IGHV3-20)
ASSYSSSWYIPRFDP

SEQ ID NO: 1633 - protein, 8 aa, Homo sapiens
  Light chain CDR3 for antibody 817 (IGKV3-15)
QQYNNWPT

SEQ ID NO: 1634 - protein, 16 aa, Homo sapiens
  Heavy chain CDR3 for antibody 817 (IGHV1-18)
ARANPGAVGYYYGMDV

SEQ ID NO: 1635 - protein, 9 aa, Homo sapiens
  Light chain CDR3 for antibody 818 (IGKV3-20)
QQYGSSPLT

SEQ ID NO: 1636 - protein, 17 aa, Homo sapiens
  Heavy chain CDR3 for antibody 818 (IGHV4-31)
ARVERITIFGVVSAVDY

SEQ ID NO: 1637 - protein, 9 aa, Homo sapiens
  Light chain CDR3 for antibody 819 (IGKV1-9)
QQLNSYPQT

SEQ ID NO: 1638 - protein, 11 aa, Homo sapiens
  Heavy chain CDR3 for antibody 819 (IGHV3-53)
ARDGRGDRWSY

SEQ ID NO: 1639 - protein, 9 aa, Homo sapiens
  Light chain CDR3 for antibody 820 (IGKV3-20)
QQYGSSPLT

SEQ ID NO: 1640 - protein, 15 aa, Homo sapiens
  Heavy chain CDR3 for antibody 820 (IGHV4-31)
ARAPKYIVVVTHFDY

SEQ ID NO: 1641 - protein, 9 aa, Homo sapiens
  Light chain CDR3 for antibody 821 (IGKV3-20)
QQYGSSPLT

SEQ ID NO: 1642 - protein, 11 aa, Homo sapiens
  Heavy chain CDR3 for antibody 821 (IGHV3-53)
ARDLGPYGMDV

SEQ ID NO: 1643 - protein, 10 aa, Homo sapiens
  Light chain CDR3 for antibody 822 (IGKV3-20)
QQSYSTPALT

SEQ ID NO: 1644 - protein, 18 aa, Homo sapiens
  Heavy chain CDR3 for antibody 822 (IGHV4/OR15-8)
ARVDSAWAGTPRFWYFDL

SEQ ID NO: 1645 - protein, 8 aa, Homo sapiens
  Light chain CDR3 for antibody 823 (IGKV1-33)
QQYDNLPS

SEQ ID NO: 1646 - protein, 20 aa, Homo sapiens
  Heavy chain CDR3 for antibody 823 (IGHV4-39)
ARTGHLIRFLEWLPINWFDP

SEQ ID NO: 1647 - protein, 8 aa, Homo sapiens
  Light chain CDR3 for antibody 824 (IGKV3-20)
QQYGSSRT

SEQ ID NO: 1648 - protein, 15 aa, Homo sapiens
  Heavy chain CDR3 for antibody 824 (IGHV1-69)
ARFANYYDSRTGIDY

SEQ ID NO: 1649 - protein, 8 aa, Homo sapiens
  Light chain CDR3 for antibody 825 (IGKV1-33)
QQYDNRLT

SEQ ID NO: 1650 - protein, 13 aa, Homo sapiens
  Heavy chain CDR3 for antibody 825 (IGHV1-69)
ARPVVGSGSNFDY

SEQ ID NO: 1651 - protein, 8 aa, Homo sapiens
  Light chain CDR3 for antibody 826 (IGKV1-33)
QQYDNLPS

SEQ ID NO: 1652 - protein, 12 aa, Homo sapiens
  Heavy chain CDR3 for antibody 826 (IGHV3-53)
ARDLGSVGATDY

SEQ ID NO: 1653 - protein, 9 aa, Homo sapiens
  Light chain CDR3 for antibody 827 (IGKV1-39)
QQSYSTYGT

SEQ ID NO: 1654 - protein, 16 aa, Homo sapiens
  Heavy chain CDR3 for antibody 827 (IGHV3-11)
ARRHGDYVQFYDGMDV

SEQ ID NO: 1655 - protein, 9 aa, Homo sapiens
  Light chain CDR3 for antibody 828 (IGKV3-15)
QQLNSYPPP

SEQ ID NO: 1656 - protein, 13 aa, Homo sapiens
  Heavy chain CDR3 for antibody 828 (IGHV4-31)
ARDYGGNSAQFGY

SEQ ID NO: 1657 - protein, 9 aa, Homo sapiens
  Light chain CDR3 for antibody 829 (IGKV1-33)
QQYDNLPLT

SEQ ID NO: 1658 - protein, 11 aa, Homo sapiens
  Heavy chain CDR3 for antibody 829 (IGHV3-53)
ARDGRGDPLYY

SEQ ID NO: 1659 - protein, 9 aa, Homo sapiens
  Light chain CDR3 for antibody 830 (IGKV1-33)
QQYDNLPLT

SEQ ID NO: 1660 - protein, 16 aa, Homo sapiens
  Heavy chain CDR3 for antibody 830 (IGHV4-31)
ARARITMIVVVSHFDY

SEQ ID NO: 1661 - protein, 9 aa, Homo sapiens
  Light chain CDR3 for antibody 831 (IGKV1-5)
QQYNSYPWT

SEQ ID NO: 1662 - protein, 18 aa, Homo sapiens
  Heavy chain CDR3 for antibody 831 (IGHV1-69)
ARVFADVDTAMVEYYFDY

SEQ ID NO: 1663 - protein, 10 aa, Homo sapiens
  Light chain CDR3 for antibody 832 (IGKV3-20)
QQYGSSPPDT

SEQ ID NO: 1664 - protein, 20 aa, Homo sapiens
  Heavy chain CDR3 for antibody 832 (IGHV4-39)
ARTGHLIRFLEWLPINWFDP

SEQ ID NO: 1665 - protein, 9 aa, Homo sapiens
  Light chain CDR3 for antibody 833 (IGKV1-39)
QQSYSTPLT

SEQ ID NO: 1666 - protein, 16 aa, Homo sapiens
  Heavy chain CDR3 for antibody 833 (IGHV4-31)
ARAVHTIFGVVSHFDY

SEQ ID NO: 1667 - protein, 10 aa, Homo sapiens
  Light chain CDR3 for antibody 834 (IGKV1-33)
QQYDNLPMYT

SEQ ID NO: 1668 - protein, 21 aa, Homo sapiens
  Heavy chain CDR3 for antibody 834 (IGHV4-31)
ARDGGEFLEWLSSRGPGWFDP

SEQ ID NO: 1669 - protein, 9 aa, Homo sapiens
  Light chain CDR3 for antibody 835 (IGKV3-20)
QQYGSSLYT

SEQ ID NO: 1670 - protein, 11 aa, Homo sapiens
  Heavy chain CDR3 for antibody 835 (IGHV1-24)
ATKGGLGELWY

SEQ ID NO: 1671 - protein, 10 aa, Homo sapiens
  Light chain CDR3 for antibody 836 (IGKV3-20)
QQYGSSPPDT

SEQ ID NO: 1672 - protein, 19 aa, Homo sapiens
  Heavy chain CDR3 for antibody 836 (IGHV1-69)
ARAHRSSTSYRLGINWFDP

SEQ ID NO: 1673 - protein, 8 aa, Homo sapiens
  Light chain CDR3 for antibody 837 (IGKV3-15)
QQYNNWPT

SEQ ID NO: 1674 - protein, 9 aa, Homo sapiens
  Heavy chain CDR3 for antibody 837 (IGHV3-53)
ARESYGMDV

SEQ ID NO: 1675 - protein, 9 aa, Homo sapiens
  Light chain CDR3 for antibody 838 (IGKV3-20)
QQYGSSLLT

SEQ ID NO: 1676 - protein, 13 aa, Homo sapiens
  Heavy chain CDR3 for antibody 838 (IGHV1-46)
ARAGTYYYYYMDV

SEQ ID NO: 1677 - protein, 9 aa, Homo sapiens
  Light chain CDR3 for antibody 839 (IGKV1-39)
QQSYSTPRT

SEQ ID NO: 1678 - protein, 16 aa, Homo sapiens
  Heavy chain CDR3 for antibody 839 (IGHV4-31)
ARARITMIVVVSHFDY

SEQ ID NO: 1679 - protein, 10 aa, Homo sapiens
  Light chain CDR3 for antibody 840 (IGKV3-11)
QQRSNWPSAV

SEQ ID NO: 1680 - protein, 18 aa, Homo sapiens
  Heavy chain CDR3 for antibody 840 (IGHV4-34)
ARGPYSSSWYGEKYYFDY

SEQ ID NO: 1681 - protein, 9 aa, Homo sapiens
  Light chain CDR3 for antibody 841 (IGKV1-39)
QQSYSTPPT

SEQ ID NO: 1682 - protein, 16 aa, Homo sapiens
  Heavy chain CDR3 for antibody 841 (IGHV1-18)
ARTWIQLYYYYYYMDV

SEQ ID NO: 1683 - protein, 9 aa, Homo sapiens
  Light chain CDR3 for antibody 842 (IGKV1-39)
QQSYSMPRA

SEQ ID NO: 1684 - protein, 17 aa, Homo sapiens
  Heavy chain CDR3 for antibody 842 (IGHV1-18)
ARDYYGGNSVVLGGFDI

SEQ ID NO: 1685 - protein, 10 aa, Homo sapiens
  Light chain CDR3 for antibody 843 (IGKV1-39)
QQSYSLPPFT

SEQ ID NO: 1686 - protein, 15 aa, Homo sapiens
  Heavy chain CDR3 for antibody 843 (IGHV4-61)
ARGTYNYGLGPWFDP

SEQ ID NO: 1687 - protein, 9 aa, Homo sapiens
  Light chain CDR3 for antibody 844 (IGKV1-33)
QQYDNLPLT

SEQ ID NO: 1688 - protein, 20 aa, Homo sapiens
  Heavy chain CDR3 for antibody 844 (IGHV3-30)
AKGQGPYCSGGSCYGSYFDY

SEQ ID NO: 1689 - protein, 9 aa, Homo sapiens
  Light chain CDR3 for antibody 845 (IGKV3-20)
QQYGSSLYT

SEQ ID NO: 1690 - protein, 24 aa, Homo sapiens
  Heavy chain CDR3 for antibody 845 (IGHV1-8)
ALLTVDYYDSSGSLPGRNVYGMDV

SEQ ID NO: 1691 - protein, 9 aa, Homo sapiens
  Light chain CDR3 for antibody 846 (IGKV1-27)
QKYNSAPWT

SEQ ID NO: 1692 - protein, 20 aa, Homo sapiens
  Heavy chain CDR3 for antibody 846 (IGHV1-46)
ARNLITMIVVVSRPYYGMDV

SEQ ID NO: 1693 - protein, 8 aa, Homo sapiens
  Light chain CDR3 for antibody 847 (IGKV1-33)
QQYDNLPS

SEQ ID NO: 1694 - protein, 18 aa, Homo sapiens
  Heavy chain CDR3 for antibody 847 (IGHV1-69)
ARGAGIVGAIWRHSCFNS

SEQ ID NO: 1695 - protein, 9 aa, Homo sapiens
  Light chain CDR3 for antibody 848 (IGKV1-9)
QQLNSYSYT

SEQ ID NO: 1696 - protein, 14 aa, Homo sapiens
  Heavy chain CDR3 for antibody 848 (IGHV3-72)
AGLVTSPPPYAMDV

SEQ ID NO: 1697 - protein, 9 aa, Homo sapiens
  Light chain CDR3 for antibody 849 (IGKV3-20)
QQYDASPRT

SEQ ID NO: 1698 - protein, 16 aa, Homo sapiens
  Heavy chain CDR3 for antibody 849 (IGHV4-59)
AKVERRVPFGRAAFDI

SEQ ID NO: 1699 - protein, 8 aa, Homo sapiens
  Light chain CDR3 for antibody 850 (IGKV1-9)
QQLNSYPA

SEQ ID NO: 1700 - protein, 11 aa, Homo sapiens
  Heavy chain CDR3 for antibody 850 (IGHV4-59)
ARLYGIESRDY

SEQ ID NO: 1701 - protein, 10 aa, Homo sapiens
  Light chain CDR3 for antibody 851 (IGKV3-20)
QQYGDSPPYT

SEQ ID NO: 1702 - protein, 10 aa, Homo sapiens
  Heavy chain CDR3 for antibody 851 (IGHV3-73)
ARQTDSCHDY

SEQ ID NO: 1703 - protein, 9 aa, Homo sapiens
  Light chain CDR3 for antibody 852 (IGKV1-33)
QQYDNLPLT

SEQ ID NO: 1704 - protein, 13 aa, Homo sapiens
  Heavy chain CDR3 for antibody 852 (IGHV4-31)
ARDYGGKSAQLDY

SEQ ID NO: 1705 - protein, 9 aa, Homo sapiens
  Light chain CDR3 for antibody 853 (IGKV3-20)
QQYGSSLYT

SEQ ID NO: 1706 - protein, 20 aa, Homo sapiens
  Heavy chain CDR3 for antibody 853 (IGHV4-b)
ARTGHLIRFLEWLPINWFDP

SEQ ID NO: 1707 - protein, 8 aa, Homo sapiens
  Light chain CDR3 for antibody 854 (IGKV1-33)
QQYDNLPS

SEQ ID NO: 1708 - protein, 15 aa, Homo sapiens
  Heavy chain CDR3 for antibody 854 (IGHV1-69)
ARGGDGYNLVAHYDY

SEQ ID NO: 1709 - protein, 9 aa, Homo sapiens
  Light chain CDR3 for antibody 855 (IGKV1-9)
QQLNSYPQT

SEQ ID NO: 1710 - protein, 9 aa, Homo sapiens
  Heavy chain CDR3 for antibody 855 (IGHV3-53)
ARESYGMDV

SEQ ID NO: 1711 - protein, 9 aa, Homo sapiens
  Light chain CDR3 for antibody 856 (IGKV1-39)
QQSYSTPPT

SEQ ID NO: 1712 - protein, 19 aa, Homo sapiens
  Heavy chain CDR3 for antibody 856 (IGHV1-46)
ASAHRSSSSYRLGTNWFDP

SEQ ID NO: 1713 - protein, 9 aa, Homo sapiens
  Light chain CDR3 for antibody 857 (IGKV3-20)
QQYGSSLYT

SEQ ID NO: 1714 - protein, 11 aa, Homo sapiens
  Heavy chain CDR3 for antibody 857 (IGHV1-18)
ARDGRGDLWYY

SEQ ID NO: 1715 - protein, 9 aa, Homo sapiens
  Light chain CDR3 for antibody 858 (IGKV1-33)
QQYDNLPLT

SEQ ID NO: 1716 - protein, 11 aa, Homo sapiens
  Heavy chain CDR3 for antibody 858 (IGHV3-53)
ARDGRGDRWYY

SEQ ID NO: 1717 - protein, 9 aa, Homo sapiens
  Light chain CDR3 for antibody 859 (IGKV1-9)
QQLNSYPQT

SEQ ID NO: 1718 - protein, 11 aa, Homo sapiens
  Heavy chain CDR3 for antibody 859 (IGHV3-53)
ARDLQEYGMHA

SEQ ID NO: 1719 - protein, 9 aa, Homo sapiens
  Light chain CDR3 for antibody 860 (IGKV1-33)
QQYDNLPLT

SEQ ID NO: 1720 - protein, 13 aa, Homo sapiens
  Heavy chain CDR3 for antibody 860 (IGHV4-31)
ARDDGGNSAHFGD

SEQ ID NO: 1721 - protein, 10 aa, Homo sapiens [sequence omitted]

SEQ ID NO: 1722 - protein, 16 aa, Homo sapiens
  Heavy chain CDR3 for antibody 861 (IGHV3-33)
AREGAAYGGKGGGFDY

SEQ ID NO: 1723 - protein, 9 aa, Homo sapiens
  Light chain CDR3 for antibody 862 (IGKV1-39)
QQSYSTPYT

SEQ ID NO: 1724 - protein, 24 aa, Homo sapiens
  Heavy chain CDR3 for antibody 862 (IGHV4-39)
AMMEELGRPPTTIEDSSYYYGLDV

SEQ ID NO: 1725 - protein, 8 aa, Homo sapiens
  Light chain CDR3 for antibody 863 (IGKV1-33)
QQYDNLPS

SEQ ID NO: 1726 - protein, 18 aa, Homo sapiens
  Heavy chain CDR3 for antibody 863 (IGHV1-69)
AREAGIVGAIGRHSFFDY

SEQ ID NO: 1727 - protein, 9 aa, Homo sapiens
  Light chain CDR3 for antibody 864 (IGKV1-9)
QQLTSYSYT

SEQ ID NO: 1728 - protein, 20 aa, Homo sapiens
  Heavy chain CDR3 for antibody 864 (IGHV4-39)
ARTGHLIRFLEWLPINWFDP

SEQ ID NO: 1729 - protein, 9 aa, Homo sapiens
  Light chain CDR3 for antibody 865 (IGKV1-39)
QQSYSTPPT

SEQ ID NO: 1730 - protein, 16 aa, Homo sapiens
  Heavy chain CDR3 for antibody 865 (IGHV3-23)
AKDRMTAPLHYWYFDL

SEQ ID NO: 1731 - protein, 9 aa, Homo sapiens
  Light chain CDR3 for antibody 866 (IGKV1-39)
QQSYSTPPT

SEQ ID NO: 1732 - protein, 19 aa, Homo sapiens
  Heavy chain CDR3 for antibody 866 (IGHV1-69)
AKAHRSSTSYRLEINWFGP

SEQ ID NO: 1733 - protein, 9 aa, Homo sapiens
  Light chain CDR3 for antibody 867 (IGKV3-20)
QQYGSSPLT

SEQ ID NO: 1734 - protein, 18 aa, Homo sapiens
  Heavy chain CDR3 for antibody 867 (IGHV4/OR15-8)
ARVDSAWAGTPRFWYFDL

SEQ ID NO: 1735 - protein, 9 aa, Homo sapiens
  Light chain CDR3 for antibody 868 (IGKV3-11)
QQRRNWPLT

SEQ ID NO: 1736 - protein, 20 aa, Homo sapiens
  Heavy chain CDR3 for antibody 868 (IGHV4-39)
ARTGHLIRFLEWLPINWFDP

SEQ ID NO: 1737 - protein, 9 aa, Homo sapiens
  Light chain CDR3 for antibody 869 (IGKV3-11)
QQRRNWPLT

SEQ ID NO: 1738 - protein, 16 aa, Homo sapiens
  Heavy chain CDR3 for antibody 869 (IGHV1-18)
ARANPGAVGYYYGMDV

SEQ ID NO: 1739 - protein, 9 aa, Homo sapiens
  Light chain CDR3 for antibody 870 (IGKV1-5)
QHYLGLSRT

SEQ ID NO: 1740 - protein, 20 aa, Homo sapiens
  Heavy chain CDR3 for antibody 870 (IGHV4-34)
ARTRRGMKTPTTNYYRGMDV

SEQ ID NO: 1741 - protein, 9 aa, Homo sapiens
  Light chain CDR3 for antibody 871 (IGKV1-9)
QQLTSYSYT

SEQ ID NO: 1742 - protein, 18 aa, Homo sapiens
  Heavy chain CDR3 for antibody 871 (IGHV1-69)
ARGAGIVGAIGRHSFFNY

SEQ ID NO: 1743 - protein, 11 aa, Homo sapiens
  Light chain CDR3 for antibody 872 (IGKV3-20)
QQYGRSPPSLT

SEQ ID NO: 1744 - protein, 16 aa, Homo sapiens
  Heavy chain CDR3 for antibody 872 (IGHV1-18)
ARANPGAVGYYYGMDV

SEQ ID NO: 1745 - protein, 9 aa, Homo sapiens
  Light chain CDR3 for antibody 873 (IGKV1-33)
QQYDNLPLT

SEQ ID NO: 1746 - protein, 13 aa, Homo sapiens
  Heavy chain CDR3 for antibody 873 (IGHV5-51)
ARRYSGFHAELDY

SEQ ID NO: 1747 - protein, 9 aa, Homo sapiens
  Light chain CDR3 for antibody 874 (IGKV3-11)
QQRRNWPLT

SEQ ID NO: 1748 - protein, 19 aa, Homo sapiens
  Heavy chain CDR3 for antibody 874 (IGHV1-69)
ARAHRSSTSYRLGINWFDP

SEQ ID NO: 1749 - protein, 9 aa, Homo sapiens
  Light chain CDR3 for antibody 875 (IGKV1-39)
QQSYSTPYS

SEQ ID NO: 1750 - protein, 15 aa, Homo sapiens
  Heavy chain CDR3 for antibody 875 (IGHV1-69)
ARRDIGSGWSSHFDY

SEQ ID NO: 1751 - protein, 9 aa, Homo sapiens
  Light chain CDR3 for antibody 876 (IGKV1-9)
QQLNSYPQT

SEQ ID NO: 1752 - protein, 16 aa, Homo sapiens
  Heavy chain CDR3 for antibody 876 (IGHV1-18)
ARANPGAVGYYYGMDV

SEQ ID NO: 1753 - protein, 8 aa, Homo sapiens
  Light chain CDR3 for antibody 877 (IGKV3-20)
QQYSSSLT

SEQ ID NO: 1754 - protein, 19 aa, Homo sapiens
  Heavy chain CDR3 for antibody 877 (IGHV1-69)
ARAHRSSTSYRLGINWFDP

SEQ ID NO: 1755 - protein, 9 aa, Homo sapiens
  Light chain CDR3 for antibody 878 (IGKV3-20)
QQYGSSPFT

SEQ ID NO: 1756 - protein, 7 aa, Homo sapiens
  Heavy chain CDR3 for antibody 878 (IGHV1-46)
AHPVQGY

SEQ ID NO: 1757 - protein, 7 aa, Homo sapiens
  Light chain CDR3 for antibody 879 (IGKV1-9)
QQLVEFT

SEQ ID NO: 1758 - protein, 11 aa, Homo sapiens
  Heavy chain CDR3 for antibody 879 (IGHV1-46)
AGADLLGGSNH

SEQ ID NO: 1759 - protein, 11 aa, Homo sapiens
  Light chain CDR3 for antibody 880 (IGKV3-15)
QQYNNWPPMYT

SEQ ID NO: 1760 - protein, 18 aa, Homo sapiens
  Heavy chain CDR3 for antibody 880 (IGHV1-69)
ARGAGIVGAIGRHSFFNY

SEQ ID NO: 1761 - protein, 8 aa, Homo sapiens
  Light chain CDR3 for antibody 881 (IGKV1-9)
QQYNNWPT

SEQ ID NO: 1762 - protein, 11 aa, Homo sapiens
  Heavy chain CDR3 for antibody 881 (IGHV3-53)
ARDLQVYGMDV

SEQ ID NO: 1763 - protein, 8 aa, Homo sapiens
  Light chain CDR3 for antibody 882 (IGKV1-5)
QQYNSPYI

SEQ ID NO: 1764 - protein, 9 aa, Homo sapiens
  Heavy chain CDR3 for antibody 882 (IGHV3-53)
ARESYGMDV

SEQ ID NO: 1765 - protein, 9 aa, Homo sapiens
  Light chain CDR3 for antibody 883 (IGKV1-39)
QQSYSTPPT

SEQ ID NO: 1766 - protein, 19 aa, Homo sapiens
  Heavy chain CDR3 for antibody 883 (IGHV1-69)
ARADHSSASYRLGINWFDP

SEQ ID NO: 1767 - protein, 9 aa, Homo sapiens
  Light chain CDR3 for antibody 884 (IGKV1-39)
QQSYSTPPT

SEQ ID NO: 1768 - protein, 19 aa, Homo sapiens
  Heavy chain CDR3 for antibody 884 (IGHV1-18)
ARAYSSRTSYRLGINWFDT

SEQ ID NO: 1769 - protein, 10 aa, Homo sapiens
  Light chain CDR3 for antibody 885 (IGKV3-20)
QQYGSSPPDT

SEQ ID NO: 1770 - protein, 18 aa, Homo sapiens
  Heavy chain CDR3 for antibody 885 (IGHV1-69)
ARGAGIVGAIGRHSFFNY

SEQ ID NO: 1771 - protein, 9 aa, Homo sapiens
  Light chain CDR3 for antibody 886 (IGKV1-39)
QQSYSTPPT

SEQ ID NO: 1772 - protein, 19 aa, Homo sapiens
  Heavy chain CDR3 for antibody 886 (IGHV1-18)
ARAHRSSTSYRIGIYGFDP

SEQ ID NO: 1773 - protein, 9 aa, Homo sapiens
  Light chain CDR3 for antibody 887 (IGKV1-33)
QQYDNLPLT

SEQ ID NO: 1774 - protein, 11 aa, Homo sapiens
  Heavy chain CDR3 for antibody 887 (IGHV3-53)
ARYGIGNRWSY

SEQ ID NO: 1775 - protein, 9 aa, Homo sapiens
  Light chain CDR3 for antibody 888 (IGKV1-39)
QQYDNLPLT

SEQ ID NO: 1776 - protein, 15 aa, Homo sapiens
  Heavy chain CDR3 for antibody 888 (IGHV3-64)
VKDVGWVVTVDAFDY

SEQ ID NO: 1777 - protein, 9 aa, Homo sapiens
  Light chain CDR3 for antibody 889 (IGKV3-20)
QQYGSSLYT

SEQ ID NO: 1778 - protein, 16 aa, Homo sapiens
  Heavy chain CDR3 for antibody 889 (IGHV1-18)
ARATPEAVGYYSGMDA

SEQ ID NO: 1779 - protein, 9 aa, Homo sapiens
  Light chain CDR3 for antibody 890 (IGKV1-39)
QQSYSTPPT

SEQ ID NO: 1780 - protein, 19 aa, Homo sapiens
  Heavy chain CDR3 for antibody 890 (IGHV1-69)
ARAYRSSTSYRLGINWLDA

SEQ ID NO: 1781 - protein, 9 aa, Homo sapiens
  Light chain CDR3 for antibody 891 (IGKV3-20)
QQYGSSLYT

SEQ ID NO: 1782 - protein, 16 aa, Homo sapiens
  Heavy chain CDR3 for antibody 891 (IGHV1-18)
ASANPGAVGYSYGMDD

SEQ ID NO: 1783 - protein, 9 aa, Homo sapiens
  Light chain CDR3 for antibody 892 (IGKV1-33)
QQYDNLPLT

SEQ ID NO: 1784 - protein, 11 aa, Homo sapiens
  Heavy chain CDR3 for antibody 892 (IGHV3-53)
ARDGRGYPLSY

SEQ ID NO: 1785 - protein, 11 aa, Homo sapiens
  Light chain CDR3 for antibody 893 (IGKV1-39)
QQSYSNPPEDS

SEQ ID NO: 1786 - protein, 22 aa, Homo sapiens
  Heavy chain CDR3 for antibody 893 (IGHV3-66)
ARAHQKRIAAAGTNYYYYYMDV

SEQ ID NO: 1787 - protein, 9 aa, Homo sapiens
  Light chain CDR3 for antibody 894 (IGKV1-39)
QQSYSTPPT

SEQ ID NO: 1788 - protein, 15 aa, Homo sapiens
  Heavy chain CDR3 for antibody 894 (IGHV3-53)
LRGGHHSGLGSPWGY

SEQ ID NO: 1789 - protein, 9 aa, Homo sapiens
  Light chain CDR3 for antibody 895 (IGKV1-39)
QQSYSTPPT

SEQ ID NO: 1790 - protein, 14 aa, Homo sapiens
  Heavy chain CDR3 for antibody 895 (IGHV3-23)
AKALAAAGYDAFDI

SEQ ID NO: 1791 - protein, 9 aa, Homo sapiens
  Light chain CDR3 for antibody 896 (IGKV1-9)
QQLNSYPQT

SEQ ID NO: 1792 - protein, 11 aa, Homo sapiens
  Heavy chain CDR3 for antibody 896 (IGHV3-53)
ARDLHYYGIDF

SEQ ID NO: 1793 - protein, 9 aa, Homo sapiens
  Light chain CDR3 for antibody 897 (IGKV1-33)
QQYDNLPLT

SEQ ID NO: 1794 - protein, 13 aa, Homo sapiens
  Heavy chain CDR3 for antibody 897 (IGHV4-31)
ASDYCGNSSQFGY

SEQ ID NO: 1795 - protein, 9 aa, Homo sapiens
  Light chain CDR3 for antibody 898 (IGKV1-33)
QQYDNLPLT

SEQ ID NO: 1796 - protein, 11 aa, Homo sapiens
  Heavy chain CDR3 for antibody 898 (IGHV3-53)
ARDGRDDPWYY

SEQ ID NO: 1797 - protein, 11 aa, Homo sapiens
  Light chain CDR3 for antibody 899 (IGKV3-20)
QQYDASPPTWT

SEQ ID NO: 1798 - protein, 17 aa, Homo sapiens
  Heavy chain CDR3 for antibody 899 (IGHV4/OR15-8)
ARGKGWFGSHFSYYMDV

SEQ ID NO: 1799 - protein, 9 aa, Homo sapiens
  Light chain CDR3 for antibody 900 (IGKV1-39)
QQSYSTPYT

SEQ ID NO: 1800 - protein, 19 aa, Homo sapiens
  Heavy chain CDR3 for antibody 900 (IGHV1-69)
AWTFDYGDYEVAYYYGMDV

SEQ ID NO: 1801 - protein, 9 aa, Homo sapiens
  Light chain CDR3 for antibody 901 (IGKV1-9)
QQLNSYPQT

SEQ ID NO: 1802 - protein, 11 aa, Homo sapiens
  Heavy chain CDR3 for antibody 901 (IGHV3-53)
ARDLQEYCMHV

SEQ ID NO: 1803 - protein, 9 aa, Homo sapiens
  Light chain CDR3 for antibody 902 (IGKV3-20)
QQYGSSPYT

SEQ ID NO: 1804 - protein, 16 aa, Homo sapiens
  Heavy chain CDR3 for antibody 902 (IGHV1-18)
ARTWIQLYYYYYYMDV

SEQ ID NO: 1805 - protein, 9 aa, Homo sapiens
  Light chain CDR3 for antibody 903 (IGKV1-9)
QQLNSYPPP

SEQ ID NO: 1806 - protein, 20 aa, Homo sapiens
  Heavy chain CDR3 for antibody 903 (IGHV4-30-2)
ARTGHLIRFLEWLPINWFDA

SEQ ID NO: 1807 - protein, 9 aa, Homo sapiens
  Light chain CDR3 for antibody 904 (IGKV1-39)
QQSYSTPPT

SEQ ID NO: 1808 - protein, 19 aa, Homo sapiens
  Heavy chain CDR3 for antibody 904 (IGHV1-69)
ARAYRSSASSRLGINWFDP

SEQ ID NO: 1809 - protein, 9 aa, Homo sapiens
  Light chain CDR3 for antibody 905 (IGKV1-9)
QQLTSYSYT

SEQ ID NO: 1810 - protein, 13 aa, Homo sapiens
  Heavy chain CDR3 for antibody 905 (IGHV4-31)
ARDYGGNSAQFGY

SEQ ID NO: 1811 - protein, 9 aa, Homo sapiens
  Light chain CDR3 for antibody 906 (IGKV1-12)
QQADSFPWP

SEQ ID NO: 1812 - protein, 16 aa, Homo sapiens
  Heavy chain CDR3 for antibody 906 (IGHV3-23)
AKDRMTAPLHYWYFDL

SEQ ID NO: 1813 - protein, 9 aa, Homo sapiens
  Light chain CDR3 for antibody 907 (IGKV1-39)
QQSYSTPPT

SEQ ID NO: 1814 - protein, 19 aa, Homo sapiens
  Heavy chain CDR3 for antibody 907 (IGHV1-69)
ARAHRSSAGYRLGINWFDP

SEQ ID NO: 1815 - protein, 9 aa, Homo sapiens
  Light chain CDR3 for antibody 908 (IGKV1-9)
QQLNSYPQT

SEQ ID NO: 1816 - protein, 16 aa, Homo sapiens
  Heavy chain CDR3 for antibody 908 (IGHV1-18)
ARANHGAVGYYYGMDV

SEQ ID NO: 1817 - protein, 9 aa, Homo sapiens
  Light chain CDR3 for antibody 909 (IGKV3-20)
QQYGSSLYT

SEQ ID NO: 1818 - protein, 14 aa, Homo sapiens
  Heavy chain CDR3 for antibody 909 (IGHV3-23)
AKALAAAGYDAFDI

SEQ ID NO: 1819 - protein, 8 aa, Homo sapiens
  Light chain CDR3 for antibody 910 (IGKV1-33)
QQYDNLPS

SEQ ID NO: 1820 - protein, 13 aa, Homo sapiens
  Heavy chain CDR3 for antibody 910 (IGHV1-69)
ARFPNAALRAFDI

SEQ ID NO: 1821 - protein, 9 aa, Homo sapiens
  Light chain CDR3 for antibody 911 (IGKV1-9)
QQLNSYPPP

SEQ ID NO: 1822 - protein, 11 aa, Homo sapiens
  Heavy chain CDR3 for antibody 911 (IGHV3-53)
ARDRGRYGMDV

SEQ ID NO: 1823 - protein, 9 aa, Homo sapiens
  Light chain CDR3 for antibody 912 (IGKV3-11)
QQRRNWPLT

SEQ ID NO: 1824 - protein, 13 aa, Homo sapiens
  Heavy chain CDR3 for antibody 912 (IGHV4-31)
ARDYGGNSAQFGY

SEQ ID NO: 1825 - protein, 9 aa, Homo sapiens
  Light chain CDR3 for antibody 913 (IGKV1-33)
QQYDNLPLT

SEQ ID NO: 1826 - protein, 13 aa, Homo sapiens
  Heavy chain CDR3 for antibody 913 (IGHV4-31)
ARDYGGNSDQFGS

SEQ ID NO: 1827 - protein, 9 aa, Homo sapiens
  Light chain CDR3 for antibody 914 (IGKV1-39)
QQSYSTPPT

SEQ ID NO: 1828 - protein, 13 aa, Homo sapiens
  Heavy chain CDR3 for antibody 914 (IGHV1-69)
ARFPNAALRAFDI

SEQ ID NO: 1829 - protein, 10 aa, Homo sapiens
  Light chain CDR3 for antibody 915 (IGKV3-NL1)
QQYGSSPPDT

SEQ ID NO: 1830 - protein, 11 aa, Homo sapiens
  Heavy chain CDR3 for antibody 915 (IGHV3-53)
ARDLQVYGMDV

SEQ ID NO: 1831 - protein, 7 aa, Homo sapiens
  Light chain CDR3 for antibody 916 (IGKV1-9)
QQLKGAT

SEQ ID NO: 1832 - protein, 14 aa, Homo sapiens
  Heavy chain CDR3 for antibody 916 (IGHV1-8)
ASDRRWLQLGAFDI

SEQ ID NO: 1833 - protein, 11 aa, Homo sapiens
  Light chain CDR3 for antibody 917 (IGKV3-15)
QQHNNWPPMYT

SEQ ID NO: 1834 - protein, 11 aa, Homo sapiens
  Heavy chain CDR3 for antibody 917 (IGHV3-53)
ARDRGPYGMDV

SEQ ID NO: 1835 - protein, 9 aa, Homo sapiens
  Light chain CDR3 for antibody 918 (IGKV1-9)
QQLNSYPQT

SEQ ID NO: 1836 - protein, 11 aa, Homo sapiens
  Heavy chain CDR3 for antibody 918 (IGHV3-53)
ARELQVYGIDV

SEQ ID NO: 1837 - protein, 9 aa, Homo sapiens
  Light chain CDR3 for antibody 919 (IGKV1-39)
QQSYSTPPT

SEQ ID NO: 1838 - protein, 19 aa, Homo sapiens
  Heavy chain CDR3 for antibody 919 (IGHV1-8)
ARAHLSSTSYRLRINWFDA

SEQ ID NO: 1839 - protein, 8 aa, Homo sapiens
  Light chain CDR3 for antibody 920 (IGKV3-11)
QQRTNWPT

SEQ ID NO: 1840 - protein, 20 aa, Homo sapiens
  Heavy chain CDR3 for antibody 920 (IGHV1-18)
ARAGDSERYYYEGYSYYMDV

SEQ ID NO: 1841 - protein, 9 aa, Homo sapiens
  Light chain CDR3 for antibody 921 (IGKV1-33)
QQYDNLPLT

SEQ ID NO: 1842 - protein, 13 aa, Homo sapiens
  Heavy chain CDR3 for antibody 921 (IGHV4-30-2)
AREYGGNSDQFGD

SEQ ID NO: 1843 - protein, 9 aa, Homo sapiens
  Light chain CDR3 for antibody 922 (IGKV1-9)
QQLNSYPQT

SEQ ID NO: 1844 - protein, 19 aa, Homo sapiens
  Heavy chain CDR3 for antibody 922 (IGHV4/OR15-8)
ARDALGYCSGGRCYAAFDI

SEQ ID NO: 1845 - protein, 9 aa, Homo sapiens
  Light chain CDR3 for antibody 923 (IGKV1-39)
QQSYSTPLT

SEQ ID NO: 1846 - protein, 24 aa, Homo sapiens
  Heavy chain CDR3 for antibody 923 (IGHV1-8)
ALLTVDYYDSSGSIPGRNVYGMDG

SEQ ID NO: 1847 - protein, 9 aa, Homo sapiens
  Light chain CDR3 for antibody 924 (IGKV1-9)
QQLNSYPQT

SEQ ID NO: 1848 - protein, 16 aa, Homo sapiens
  Heavy chain CDR3 for antibody 924 (IGHV1-18)
ARTWIQLYYYYYYMDV

SEQ ID NO: 1849 - protein, 9 aa, Homo sapiens
  Light chain CDR3 for antibody 925 (IGKV1-9)
QQLNSYPPP

SEQ ID NO: 1850 - protein, 11 aa, Homo sapiens
  Heavy chain CDR3 for antibody 925 (IGHV3-53)
ARDLQVYGIDV

SEQ ID NO: 1851 - protein, 9 aa, Homo sapiens
  Light chain CDR3 for antibody 926 (IGKV1-39)
QQSYSTPPT

SEQ ID NO: 1852 - protein, 19 aa, Homo sapiens
  Heavy chain CDR3 for antibody 926 (IGHV1-69)
ARAQRSGTSYRLGINCFDP

SEQ ID NO: 1853 - protein, 9 aa, Homo sapiens
  Light chain CDR3 for antibody 927 (IGKV1-33)
QQYDNLPLT

SEQ ID NO: 1854 - protein, 13 aa, Homo sapiens
  Heavy chain CDR3 for antibody 927 (IGHV4-31)
ARDCGDKSEQFGY

SEQ ID NO: 1855 - protein, 9 aa, Homo sapiens
  Light chain CDR3 for antibody 928 (IGKV1-9)
QQSLTIPYT

SEQ ID NO: 1856 - protein, 11 aa, Homo sapiens
  Heavy chain CDR3 for antibody 928 (IGHV3-53)
ARDLQPYGMDV

SEQ ID NO: 1857 - protein, 9 aa, Homo sapiens
  Light chain CDR3 for antibody 929 (IGKV1-9)
QQLTSYSYT

SEQ ID NO: 1858 - protein, 15 aa, Homo sapiens
  Heavy chain CDR3 for antibody 929 (IGHV3-64)
VKDVGWVVTVDAFDY

SEQ ID NO: 1859 - protein, 9 aa, Homo sapiens
  Light chain CDR3 for antibody 930 (IGKV1-33)
QQYDNLPLT

SEQ ID NO: 1860 - protein, 11 aa, Homo sapiens
  Heavy chain CDR3 for antibody 930 (IGHV3-53)
ARDGRGDRLHY

SEQ ID NO: 1861 - protein, 8 aa, Homo sapiens
  Light chain CDR3 for antibody 931 (IGKV3-15)
QQYIKLLS

SEQ ID NO: 1862 - protein, 9 aa, Homo sapiens
  Heavy chain CDR3 for antibody 931 (IGHV3-53)
ARESYGMDV

SEQ ID NO: 1863 - protein, 11 aa, Homo sapiens
  Light chain CDR3 for antibody 932 (IGKV3-15)
QQYNNWPPMYT

SEQ ID NO: 1864 - protein, 12 aa, Homo sapiens
  Heavy chain CDR3 for antibody 932 (IGHV3-66)
TRDLRSVLATDY

SEQ ID NO: 1865 - protein, 10 aa, Homo sapiens
  Light chain CDR3 for antibody 933 (IGKV3-20)
QQYGSSPPDT

SEQ ID NO: 1866 - protein, 9 aa, Homo sapiens
  Heavy chain CDR3 for antibody 933 (IGHV3-53)
ARESYGMDV

SEQ ID NO: 1867 - protein, 9 aa, Homo sapiens
  Light chain CDR3 for antibody 934 (IGKV1-33)
QQYDNLPLT

SEQ ID NO: 1868 - protein, 16 aa, Homo sapiens
  Heavy chain CDR3 for antibody 934 (IGHV3-23)
AKDRMTAPLHYWYFDL

SEQ ID NO: 1869 - protein, 9 aa, Homo sapiens
  Light chain CDR3 for antibody 935 (IGKV1-33)
QQCHSLPAT

SEQ ID NO: 1870 - protein, 14 aa, Homo sapiens
  Heavy chain CDR3 for antibody 935 (IGHV4-39)
ARKEVYSESSGYYG

SEQ ID NO: 1871 - protein, 9 aa, Homo sapiens
  Light chain CDR3 for antibody 936 (IGKV1-39)
QQSYSTPPT

SEQ ID NO: 1872 - protein, 15 aa, Homo sapiens
  Heavy chain CDR3 for antibody 936 (IGHV1-69)
ARGGDGYNLVAHYDY

SEQ ID NO: 1873 - protein, 8 aa, Homo sapiens
  Light chain CDR3 for antibody 937 (IGKV1-5)
QQYAFYWT

SEQ ID NO: 1874 - protein, 9 aa, Homo sapiens
  Heavy chain CDR3 for antibody 937 (IGHV4-61)
ANRFGSPFY

SEQ ID NO: 1875 - protein, 9 aa, Homo sapiens
  Light chain CDR3 for antibody 938 (IGKV1-39)
QQSYSTPPT

SEQ ID NO: 1876 - protein, 15 aa, Homo sapiens
  Heavy chain CDR3 for antibody 938 (IGHV3-74)
ARDLGTMIVEENFDY

SEQ ID NO: 1877 - protein, 9 aa, Homo sapiens
  Light chain CDR3 for antibody 939 (IGKV1-39)
QQSYSTPPT

SEQ ID NO: 1878 - protein, 19 aa, Homo sapiens
  Heavy chain CDR3 for antibody 939 (IGHV1-69)
ARAHHSSTSYQLGINCFDP

SEQ ID NO: 1879 - protein, 9 aa, Homo sapiens
  Light chain CDR3 for antibody 940 (IGKV3-20)
QQYGSSPLT

SEQ ID NO: 1880 - protein, 19 aa, Homo sapiens
  Heavy chain CDR3 for antibody 940 (IGHV1-69)
ARAHSSITSYRLGINWFDP

SEQ ID NO: 1881 - protein, 9 aa, Homo sapiens
  Light chain CDR3 for antibody 941 (IGKV1-33)
QQYDNLPLT

SEQ ID NO: 1882 - protein, 13 aa, Homo sapiens
  Heavy chain CDR3 for antibody 941 (IGHV4-31)
ARGYGGNSGQFGY

SEQ ID NO: 1883 - protein, 11 aa, Homo sapiens
  Light chain CDR3 for antibody 942 (IGKV3-15)
QQYNNWPPMYT

SEQ ID NO: 1884 - protein, 13 aa, Homo sapiens
  Heavy chain CDR3 for antibody 942 (IGHV5-51)
ARRYSGFHAELDY

SEQ ID NO: 1885 - protein, 11 aa, Homo sapiens
  Light chain CDR3 for antibody 943 (IGKV3-20)
QQYGRSPPSLP

SEQ ID NO: 1886 - protein, 19 aa, Homo sapiens
  Heavy chain CDR3 for antibody 943 (IGHV1-69)
ARTSRSATIFGVLYDGLDI

SEQ ID NO: 1887 - protein, 8 aa, Homo sapiens
  Light chain CDR3 for antibody 944 (IGKV1-33)
QYGNLPLT

SEQ ID NO: 1888 - protein, 13 aa, Homo sapiens
  Heavy chain CDR3 for antibody 944 (IGHV4-31)
ARDYGGNSAQFGY

SEQ ID NO: 1889 - protein, 9 aa, Homo sapiens
  Light chain CDR3 for antibody 945 (IGKV1-9)
QQLTSYSYT

SEQ ID NO: 1890 - protein, 9 aa, Homo sapiens
  Heavy chain CDR3 for antibody 945 (IGHV3-53)
ARESYGIDV

SEQ ID NO: 1891 - protein, 9 aa, Homo sapiens
  Light chain CDR3 for antibody 946 (IGKV3-20)
QQYGSSPLT

SEQ ID NO: 1892 - protein, 14 aa, Homo sapiens
  Heavy chain CDR3 for antibody 946 (IGHV4-30-2)
ARWSSNHFGALFDS

SEQ ID NO: 1893 - protein, 9 aa, Homo sapiens
  Light chain CDR3 for antibody 947 (IGKV1-39)
QQSYSTPPT

SEQ ID NO: 1894 - protein, 19 aa, Homo sapiens
  Heavy chain CDR3 for antibody 947 (IGHV1-69)
ARADSSSTSCRLGINWFDP

SEQ ID NO: 1895 - protein, 8 aa, Homo sapiens
  Light chain CDR3 for antibody 948 (IGKV1-33)
QQYDNLPS

SEQ ID NO: 1896 - protein, 18 aa, Homo sapiens
  Heavy chain CDR3 for antibody 948 (IGHV1-69)
ARGAGIVGAIGRHAVFNY

SEQ ID NO: 1897 - protein, 9 aa, Homo sapiens
  Light chain CDR3 for antibody 949 (IGKV2D-28)
MQALQTSFT

SEQ ID NO: 1898 - protein, 16 aa, Homo sapiens
  Heavy chain CDR3 for antibody 949 (IGHV5-51)
ARLQPPPYYYYYGMDV

SEQ ID NO: 1899 - protein, 8 aa, Homo sapiens
  Light chain CDR3 for antibody 950 (IGKV3-20)
QQYGSSPT

SEQ ID NO: 1900 - protein, 20 aa, Homo sapiens
  Heavy chain CDR3 for antibody 950 (IGHV1-2)
ASGTYYYDSSGYYWNDAFDI

SEQ ID NO: 1901 - protein, 9 aa, Homo sapiens
  Light chain CDR3 for antibody 951 (IGKV1-33)
QQYDNLPPT

SEQ ID NO: 1902 - protein, 20 aa, Homo sapiens
  Heavy chain CDR3 for antibody 951 (IGHV3-64)
AKTAGPYCSGGSCYSGNVDY

SEQ ID NO: 1903 - protein, 10 aa, Homo sapiens
  Light chain CDR3 for antibody 952 (IGKV1-39)
QQSYITPLYS

SEQ ID NO: 1904 - protein, 16 aa, Homo sapiens
  Heavy chain CDR3 for antibody 952 (IGHV3-13)
ARVTYDSSGYLHWFDP

SEQ ID NO: 1905 - protein, 10 aa, Homo sapiens
  Light chain CDR3 for antibody 953 (IGKV1-9)
QQLNSYPPLT

SEQ ID NO: 1906 - protein, 18 aa, Homo sapiens
  Heavy chain CDR3 for antibody 953 (IGHV3-33)
AKDGAAMARGYYYYGMDV

SEQ ID NO: 1907 - protein, 9 aa, Homo sapiens
  Light chain CDR3 for antibody 954 (IGKV3-20)
QQYGSSPPT

SEQ ID NO: 1908 - protein, 24 aa, Homo sapiens
  Heavy chain CDR3 for antibody 954 (IGHV1-46)
AGPITMVRGVIIPDYYYYYYGMDV

SEQ ID NO: 1909 - protein, 10 aa, Homo sapiens
  Light chain CDR3 for antibody 955 (IGKV1-39)
QQSYNSPPYT

SEQ ID NO: 1910 - protein, 18 aa, Homo sapiens
  Heavy chain CDR3 for antibody 955 (IGHV2-5)
ARSQARDSSWPTRNYFDY

SEQ ID NO: 1911 - protein, 10 aa, Homo sapiens
  Light chain CDR3 for antibody 956 (IGKV3-11)
QQRSNWPSIT

SEQ ID NO: 1912 - protein, 14 aa, Homo sapiens
  Heavy chain CDR3 for antibody 956 (IGHV1-8)
ASVPYGSGRRYFDY

SEQ ID NO: 1913 - protein, 8 aa, Homo sapiens
  Light chain CDR3 for antibody 957 (IGKV3-20)
QQYGSSPT

SEQ ID NO: 1914 - protein, 9 aa, Homo sapiens
  Heavy chain CDR3 for antibody 957 (IGHV4/OR15-8)
ARVLGAMFT

SEQ ID NO: 1915 - protein, 8 aa, Homo sapiens
  Light chain CDR3 for antibody 958 (IGKV1-33)
QQYDTPST

SEQ ID NO: 1916 - protein, 12 aa, Homo sapiens
  Heavy chain CDR3 for antibody 958 (IGHV4-b)
ARRDPVREGFDI

SEQ ID NO: 1917 - protein, 10 aa, Homo sapiens
  Light chain CDR3 for antibody 959 (IGKV1-39)
QQSYSTPLCS

SEQ ID NO: 1918 - protein, 15 aa, Homo sapiens
  Heavy chain CDR3 for antibody 959 (IGHV3-9)
AKVDWSGYYGDAFDI

SEQ ID NO: 1919 - protein, 9 aa, Homo sapiens
  Light chain CDR3 for antibody 960 (IGKV1-27)
QKYNTAPWT

SEQ ID NO: 1920 - protein, 16 aa, Homo sapiens
  Heavy chain CDR3 for antibody 960 (IGHV1-18)
ARYLFGFGEVLTPFDY

SEQ ID NO: 1921 - protein, 9 aa, Homo sapiens
  Light chain CDR3 for antibody 961 (IGKV1-39)
QQSYSTPLT

SEQ ID NO: 1922 - protein, 12 aa, Homo sapiens
  Heavy chain CDR3 for antibody 961 (IGHV3-64)
AQSPVTTGFFDD

SEQ ID NO: 1923 - protein, 9 aa, Homo sapiens
  Light chain CDR3 for antibody 962 (IGKV3-20)
QQYGSSPRT

SEQ ID NO: 1924 - protein, 9 aa, Homo sapiens
  Heavy chain CDR3 for antibody 962 (IGHV1-18)
ARGSQLGDY

SEQ ID NO: 1925 - protein, 10 aa, Homo sapiens
  Light chain CDR3 for antibody 963 (IGKV3-15)
QQYGDWPLIT

SEQ ID NO: 1926 - protein, 16 aa, Homo sapiens
  Heavy chain CDR3 for antibody 963 (IGHV3-30)
AKDGEYRNGWYEPVDY

SEQ ID NO: 1927 - protein, 9 aa, Homo sapiens
  Light chain CDR3 for antibody 964 (IGKV3-20)
QQYGSSPPT

SEQ ID NO: 1928 - protein, 12 aa, Homo sapiens
  Heavy chain CDR3 for antibody 964 (IGHV1-69)
ARWGDYYDSSDY

SEQ ID NO: 1929 - protein, 8 aa, Homo sapiens
  Light chain CDR3 for antibody 965 (IGKV3-11)
QQRTNWPT

SEQ ID NO: 1930 - protein, 20 aa, Homo sapiens
  Heavy chain CDR3 for antibody 965 (IGHV1-18)
ARAGDSERYYYEGYNYYMDV

SEQ ID NO: 1931 - protein, 8 aa, Homo sapiens
  Light chain CDR3 for antibody 966 (IGKV2D-28)
MQALQTIT

SEQ ID NO: 1932 - protein, 20 aa, Homo sapiens
  Heavy chain CDR3 for antibody 966 (IGHV2-26)
AHISYDFWSAYRDAENWFDP

SEQ ID NO: 1933 - protein, 10 aa, Homo sapiens
  Light chain CDR3 for antibody 967 (IGKV1-39)
QQSYSTPALT

SEQ ID NO: 1934 - protein, 9 aa, Homo sapiens
  Heavy chain CDR3 for antibody 967 (IGHV4/OR15-8)
ARVLGAMFT

SEQ ID NO: 1935 - protein, 9 aa, Homo sapiens
  Light chain CDR3 for antibody 968 (IGKV1-5)
QQYNQYSET

SEQ ID NO: 1936 - protein, 9 aa, Homo sapiens
  Heavy chain CDR3 for antibody 968 (IGHV3-53)
ARNPSSGGY

SEQ ID NO: 1937 - protein, 8 aa, Homo sapiens
  Light chain CDR3 for antibody 969 (IGKV3-20)
QQYGSSPT

SEQ ID NO: 1938 - protein, 20 aa, Homo sapiens
  Heavy chain CDR3 for antibody 969 (IGHV5-51)
ARLGVEQQLPPHPNYYGMDV

SEQ ID NO: 1939 - protein, 9 aa, Homo sapiens
  Light chain CDR3 for antibody 970 (IGKV1-39)
QQSHSPPLT

SEQ ID NO: 1940 - protein, 15 aa, Homo sapiens
  Heavy chain CDR3 for antibody 970 (IGHV1-2)
ARAVSAQRLIIISDF

SEQ ID NO: 1941 - protein, 10 aa, Homo sapiens
  Light chain CDR3 for antibody 971 (IGKV3-15)
QQYYNWPPWT

SEQ ID NO: 1942 - protein, 11 aa, Homo sapiens
  Heavy chain CDR3 for antibody 971 (IGHV1-8)
ARGLGGHYFDY

SEQ ID NO: 1943 - protein, 9 aa, Homo sapiens
  Light chain CDR3 for antibody 972 (IGKV1-39)
QQSYSIPWT

SEQ ID NO: 1944 - protein, 10 aa, Homo sapiens
  Heavy chain CDR3 for antibody 972 (IGHV6-1)
ARTENRRFDP

SEQ ID NO: 1945 - protein, 10 aa, Homo sapiens
  Light chain CDR3 for antibody 973 (IGKV1-39)
QQSYSTPPWT

SEQ ID NO: 1946 - protein, 20 aa, Homo sapiens
  Heavy chain CDR3 for antibody 973 (IGHV5-51)
ARLGVEQQLPPHPNYYGMDV

SEQ ID NO: 1947 - protein, 8 aa, Homo sapiens
  Light chain CDR3 for antibody 974 (IGKV1-5)
QQYDHYPT

SEQ ID NO: 1948 - protein, 17 aa, Homo sapiens
  Heavy chain CDR3 for antibody 974 (IGHV3-23)
AKSHYCSGGRCYSVFDS

SEQ ID NO: 1949 - protein, 9 aa, Homo sapiens
  Light chain CDR3 for antibody 975 (IGKV3-20)
QQYGRSPRT

SEQ ID NO: 1950 - protein, 15 aa, Homo sapiens
  Heavy chain CDR3 for antibody 975 (IGHV1-18)
ARPITILDYYYGMDV

SEQ ID NO: 1951 - protein, 9 aa, Homo sapiens
  Light chain CDR3 for antibody 976 (IGKV3-11)
QQYNDWPWT

SEQ ID NO: 1952 - protein, 10 aa, Homo sapiens
  Heavy chain CDR3 for antibody 976 (IGHV2-5)
AHQRTADIDY

SEQ ID NO: 1953 - protein, 8 aa, Homo sapiens
  Light chain CDR3 for antibody 977 (IGKV3-20)
QQYGSSPT

SEQ ID NO: 1954 - protein, 13 aa, Homo sapiens
  Heavy chain CDR3 for antibody 977 (IGHV4-b)
ARSPRGDFYYFDY

SEQ ID NO: 1955 - protein, 9 aa, Homo sapiens
  Light chain CDR3 for antibody 978 (IGKV3-20)
QQYGTSART

SEQ ID NO: 1956 - protein, 12 aa, Homo sapiens
  Heavy chain CDR3 for antibody 978 (IGHV4-34)
ARGYRGYKFWDH

SEQ ID NO: 1957 - protein, 8 aa, Homo sapiens
  Light chain CDR3 for antibody 979 (IGKV1-NL1)
QQYYSTRT

SEQ ID NO: 1958 - protein, 14 aa, Homo sapiens
  Heavy chain CDR3 for antibody 979 (IGHV3-20)
ARQDDYEPLLGLDS

SEQ ID NO: 1959 - protein, 8 aa, Homo sapiens
  Light chain CDR3 for antibody 980 (IGKV1-9)
QQVYMYFS

SEQ ID NO: 1960 - protein, 19 aa, Homo sapiens
  Heavy chain CDR3 for antibody 980 (IGHV4-b)
ARNASRVYDHVTAYSPFDY

SEQ ID NO: 1961 - protein, 9 aa, Homo sapiens
  Light chain CDR3 for antibody 981 (IGKV1-16)
QQYISYPIT

SEQ ID NO: 1962 - protein, 14 aa, Homo sapiens
  Heavy chain CDR3 for antibody 981 (IGHV4-b)
ARRIGVAGHWYFDL

SEQ ID NO: 1963 - protein, 10 aa, Homo sapiens
  Light chain CDR3 for antibody 982 (IGKV1-39)
QQSYSTPPWT

SEQ ID NO: 1964 - protein, 20 aa, Homo sapiens
  Heavy chain CDR3 for antibody 982 (IGHV1-2)
ASGTYYYDSSGYYWNDAFDI

SEQ ID NO: 1965 - protein, 9 aa, Homo sapiens
  Light chain CDR3 for antibody 983 (IGKV1-27)
QKYNSPPLT

SEQ ID NO: 1966 - protein, 19 aa, Homo sapiens
  Heavy chain CDR3 for antibody 983 (IGHV1-69)
ARDIVAVPAAEWGLYGMDV

SEQ ID NO: 1967 - protein, 9 aa, Homo sapiens
  Light chain CDR3 for antibody 984 (IGKV1-17)
LQHHNYPWT

SEQ ID NO: 1968 - protein, 15 aa, Homo sapiens
  Heavy chain CDR3 for antibody 984 (IGHV1-69)
AVNDAYTNSWYYFDY

SEQ ID NO: 1969 - protein, 8 aa, Homo sapiens
  Light chain CDR3 for antibody 985 (IGKV3-20)
QQYGSSPT

SEQ ID NO: 1970 - protein, 21 aa, Homo sapiens
  Heavy chain CDR3 for antibody 985 (IGHV4/OR15-8)
ARDRGRYYDSSGYEEMYAFDI

SEQ ID NO: 1971 - protein, 8 aa, Homo sapiens
  Light chain CDR3 for antibody 986 (IGKV3-20)
QQYGSSPT

SEQ ID NO: 1972 - protein, 16 aa, Homo sapiens
  Heavy chain CDR3 for antibody 986 (IGHV4-61)
ARDGSYSSSWKNWFDP

SEQ ID NO: 1973 - protein, 9 aa, Homo sapiens
  Light chain CDR3 for antibody 987 (IGKV1-39)
QQTYSTPMT

SEQ ID NO: 1974 - protein, 11 aa, Homo sapiens
  Heavy chain CDR3 for antibody 987 (IGHV1-8)
AVAGHRRSLSL

SEQ ID NO: 1975 - protein, 9 aa, Homo sapiens
  Light chain CDR3 for antibody 988 (IGKV3-20)
QQYGTSPQT

SEQ ID NO: 1976 - protein, 17 aa, Homo sapiens
  Heavy chain CDR3 for antibody 988 (IGHV1-69)
ARGTFSGYSPTLHWFDP

SEQ ID NO: 1977 - protein, 9 aa, Homo sapiens
  Light chain CDR3 for antibody 989 (IGKV1-33)
QQYDNLPYS

SEQ ID NO: 1978 - protein, 13 aa, Homo sapiens
  Heavy chain CDR3 for antibody 989 (IGHV4-b)
ARSPRGDFYYFDY

SEQ ID NO: 1979 - protein, 10 aa, Homo sapiens
  Light chain CDR3 for antibody 990 (IGKV3-15)
QQYNNWPPYT

SEQ ID NO: 1980 - protein, 16 aa, Homo sapiens
  Heavy chain CDR3 for antibody 990 (IGHV2-26)
ARIRPEWLRFYWYFDL

SEQ ID NO: 1981 - protein, 9 aa, Homo sapiens
  Light chain CDR3 for antibody 991 (IGKV2-30)
MQGAHWPYT

SEQ ID NO: 1982 - protein, 11 aa, Homo sapiens
  Heavy chain CDR3 for antibody 991 (IGHV4-59)
ARASYGNHFDY

SEQ ID NO: 1983 - protein, 10 aa, Homo sapiens
  Light chain CDR3 for antibody 992 (IGKV1-39)
QQSYSTPPWT

SEQ ID NO: 1984 - protein, 24 aa, Homo sapiens
  Heavy chain CDR3 for antibody 992 (IGHV1-46)
AGPITMVRGVIIPDYYYYYYGMDV

SEQ ID NO: 1985 - protein, 8 aa, Homo sapiens
  Light chain CDR3 for antibody 993 (IGKV3-20)
QQYGSSPT

SEQ ID NO: 1986 - protein, 18 aa, Homo sapiens
  Heavy chain CDR3 for antibody 993 (IGHV3-13)
ARGVSSSWGYYYYYYMDV

SEQ ID NO: 1987 - protein, 10 aa, Homo sapiens
  Light chain CDR3 for antibody 994 (IGKV3-15)
QQYDNWPPYT

SEQ ID NO: 1988 - protein, 17 aa, Homo sapiens
  Heavy chain CDR3 for antibody 994 (IGHV4-34)
ARGQGMGVAALFFYFDS

SEQ ID NO: 1989 - protein, 10 aa, Homo sapiens
  Light chain CDR3 for antibody 995 (IGKV3-11)
QQRSNWPPFT

SEQ ID NO: 1990 - protein, 15 aa, Homo sapiens
  Heavy chain CDR3 for antibody 995 (IGHV1-69)
ARYTGDGYNRGDFDY

SEQ ID NO: 1991 - protein, 9 aa, Homo sapiens
  Light chain CDR3 for antibody 996 (IGKV3-20)
QQYGSLPRT

SEQ ID NO: 1992 - protein, 12 aa, Homo sapiens
  Heavy chain CDR3 for antibody 996 (IGHV3-74)
ARGGWHGSYFDY

SEQ ID NO: 1993 - protein, 9 aa, Homo sapiens
  Light chain CDR3 for antibody 997 (IGKV1-39)
QQSYSTPYT

SEQ ID NO: 1994 - protein, 17 aa, Homo sapiens
  Heavy chain CDR3 for antibody 997 (IGHV1-2)
ARDDCSGGSCYSSWFDP

SEQ ID NO: 1995 - protein, 9 aa, Homo sapiens
  Light chain CDR3 for antibody 998 (IGKV1-12)
QQANSFPYS

SEQ ID NO: 1996 - protein, 13 aa, Homo sapiens
  Heavy chain CDR3 for antibody 998 (IGHV4-b)
ARSPRGDFYYFDY

SEQ ID NO: 1997 - protein, 9 aa, Homo sapiens
  Light chain CDR3 for antibody 999 (IGKV1-12)
QQANSFPYS

SEQ ID NO: 1998 - protein, 9 aa, Homo sapiens
  Heavy chain CDR3 for antibody 999 (IGHV4/OR15-8)
ARVLGAMFT

SEQ ID NO: 1999 - protein, 8 aa, Homo sapiens
  Light chain CDR3 for antibody 1000 (IGKV3-11)
QQRSNWIT

SEQ ID NO: 2000 - protein, 9 aa, Homo sapiens
  Heavy chain CDR3 for antibody 1000 (IGHV1-46)
CGWGYGMDV

SEQ ID NO: 2001 - protein, 9 aa, Homo sapiens
  Light chain CDR3 for antibody 1001 (IGKV1-39)
QQSYSTPYS

SEQ ID NO: 2002 - protein, 17 aa, Homo sapiens
  Heavy chain CDR3 for antibody 1001 (IGHV1-2)
ARDSCSGGSCYSAWFDP

SEQ ID NO: 2003 - protein, 8 aa, Homo sapiens
  Light chain CDR3 for antibody 1002 (IGKV1-NL1)
QQYYSTRT

SEQ ID NO: 2004 - protein, 24 aa, Homo sapiens
  Heavy chain CDR3 for antibody 1002 (IGHV1-46)
AGPITMVRGVIIPDYYYYYYGMDV

SEQ ID NO: 2005 - protein, 9 aa, Homo sapiens
  Light chain CDR3 for antibody 1003 (IGKV1-39)
QQSYSTPPS

SEQ ID NO: 2006 - protein, 24 aa, Homo sapiens
  Heavy chain CDR3 for antibody 1003 (IGHV1-46)
AGPITMVRGVIIPDYYYYYYGMDV

SEQ ID NO: 2007 - protein, 11 aa, Homo sapiens
  Light chain CDR3 for antibody 1004 (IGKV3-11)
QQRSNWPPLFT

SEQ ID NO: 2008 - protein, 18 aa, Homo sapiens
  Heavy chain CDR3 for antibody 1004 (IGHV4-b)
ATAYCGGDCSRGWVAMGV

SEQ ID NO: 2009 - protein, 9 aa, Homo sapiens
  Light chain CDR3 for antibody 1005 (IGKV1-5)
QQYNSYSCT

SEQ ID NO: 2010 - protein, 17 aa, Homo sapiens
  Heavy chain CDR3 for antibody 1005 (IGHV4-31)
ARGATEYAAANVSGMDV

SEQ ID NO: 2011 - protein, 10 aa, Homo sapiens
  Light chain CDR3 for antibody 1006 (IGKV3-20)
QQYGRSPPIT

SEQ ID NO: 2012 - protein, 17 aa, Homo sapiens
  Heavy chain CDR3 for antibody 1006 (IGHV1-18)
ARDRSIDMVVVINPFDS

SEQ ID NO: 2013 - protein, 9 aa, Homo sapiens
  Light chain CDR3 for antibody 1007 (IGKV1-9)
QQLDIYPLT

SEQ ID NO: 2014 - protein, 14 aa, Homo sapiens
  Heavy chain CDR3 for antibody 1007 (IGHV3-23)
AKCSHNCQREYFQH

SEQ ID NO: 2015 - protein, 9 aa, Homo sapiens
  Light chain CDR3 for antibody 1008 (IGKV1-39)
QQSYSAPRT

SEQ ID NO: 2016 - protein, 15 aa, Homo sapiens
  Heavy chain CDR3 for antibody 1008 (IGHV1-2)
AREPGGQWLFPHFDF

SEQ ID NO: 2017 - protein, 10 aa, Homo sapiens
  Light chain CDR3 for antibody 1009 (IGKV3-11)
QQRGNWPSPT

SEQ ID NO: 2018 - protein, 13 aa, Homo sapiens
  Heavy chain CDR3 for antibody 1009 (IGHV1-8)
ARGGDIMASYVDY

SEQ ID NO: 2019 - protein, 8 aa, Homo sapiens
  Light chain CDR3 for antibody 1010 (IGKV3-20)
QQYGSSPT

SEQ ID NO: 2020 - protein, 15 aa, Homo sapiens
  Heavy chain CDR3 for antibody 1010 (IGHV1-69)
ARRDIGSGWSSHFDY

SEQ ID NO: 2021 - protein, 8 aa, Homo sapiens
  Light chain CDR3 for antibody 1011 (IGKV3-20)
QQYGSSPT

SEQ ID NO: 2022 - protein, 13 aa, Homo sapiens
  Heavy chain CDR3 for antibody 1011 (IGHV1-18)
AREDGDYVVSFDY

SEQ ID NO: 2023 - protein, 9 aa, Homo sapiens
  Light chain CDR3 for antibody 1012 (IGKV3-20)
QQYGTLPRT

SEQ ID NO: 2024 - protein, 8 aa, Homo sapiens
  Heavy chain CDR3 for antibody 1012 (IGHV4-59)
ARASRMDV

SEQ ID NO: 2025 - protein, 9 aa, Homo sapiens
  Light chain CDR3 for antibody 1013 (IGKV3-NL5)
QQYDSSFPT

SEQ ID NO: 2026 - protein, 13 aa, Homo sapiens
  Heavy chain CDR3 for antibody 1013 (IGHV3-53)
AARPSGRFGPYDY

SEQ ID NO: 2027 - protein, 9 aa, Homo sapiens
  Light chain CDR3 for antibody 1014 (IGKV1-39)
QQCFTSPWT

SEQ ID NO: 2028 - protein, 16 aa, Homo sapiens
  Heavy chain CDR3 for antibody 1014 (IGHV4-b)
TRAYYDILTGSWGMDV

SEQ ID NO: 2029 - protein, 9 aa, Homo sapiens
  Light chain CDR3 for antibody 1015 (IGKV1-39)
QQYHSYPWT

SEQ ID NO: 2030 - protein, 8 aa, Homo sapiens
  Heavy chain CDR3 for antibody 1015 (IGHV3-11)
AKEHRWGI

SEQ ID NO: 2031 - protein, 9 aa, Homo sapiens
  Light chain CDR3 for antibody 1016 (IGKV1-33)
QQYDDLPLT

SEQ ID NO: 2032 - protein, 11 aa, Homo sapiens
  Heavy chain CDR3 for antibody 1016 (IGHV4-59)
ARASYGNHFDY

SEQ ID NO: 2033 - protein, 10 aa, Homo sapiens
  Light chain CDR3 for antibody 1017 (IGKV3-15)
QQYNNWPPLT

SEQ ID NO: 2034 - protein, 18 aa, Homo sapiens
  Heavy chain CDR3 for antibody 1017 (IGHV4-34)
ARGEYSSSWYGFRNWFDP

SEQ ID NO: 2035 - protein, 10 aa, Homo sapiens
  Light chain CDR3 for antibody 1018 (IGKV3-20)
QQYGGSPPYT

SEQ ID NO: 2036 - protein, 17 aa, Homo sapiens
  Heavy chain CDR3 for antibody 1018 (IGHV1-69)
ARGPFELNDASEYALDV

SEQ ID NO: 2037 - protein, 9 aa, Homo sapiens
  Light chain CDR3 for antibody 1019 (IGKV1-39)
QQSYSTPPS

SEQ ID NO: 2038 - protein, 20 aa, Homo sapiens
  Heavy chain CDR3 for antibody 1019 (IGHV1-2)
ASGTYYYDSSGYYWNDAFDI

SEQ ID NO: 2039 - protein, 9 aa, Homo sapiens
  Light chain CDR3 for antibody 1020 (IGKV1-5)
QQYSGYPWT

SEQ ID NO: 2040 - protein, 12 aa, Homo sapiens
  Heavy chain CDR3 for antibody 1020 (IGHV4-61)
AGFLYGGGGRGP

SEQ ID NO: 2041 - protein, 9 aa, Homo sapiens
  Light chain CDR3 for antibody 1021 (IGKV1-12)
QQAYSYPLT

SEQ ID NO: 2042 - protein, 19 aa, Homo sapiens
  Heavy chain CDR3 for antibody 1021 (IGHV4-59)
ARDVDIVIRGAIAANWFDP

SEQ ID NO: 2043 - protein, 10 aa, Homo sapiens
  Light chain CDR3 for antibody 1022 (IGKV1-39)
QQSYSTPALT

SEQ ID NO: 2044 - protein, 16 aa, Homo sapiens
  Heavy chain CDR3 for antibody 1022 (IGHV4-61)
ARDGSYSSSWKNWFDP

SEQ ID NO: 2045 - protein, 9 aa, Homo sapiens
  Light chain CDR3 for antibody 1023 (IGKV3-20)
QQYGSSPPT

SEQ ID NO: 2046 - protein, 18 aa, Homo sapiens
  Heavy chain CDR3 for antibody 1023 (IGHV3-13)
ARGVSSSWGYYYYYYMDV

SEQ ID NO: 2047 - protein, 9 aa, Homo sapiens
  Light chain CDR3 for antibody 1024 (IGKV3-20)
QQYGNSLFT

SEQ ID NO: 2048 - protein, 9 aa, Homo sapiens
  Heavy chain CDR3 for antibody 1024 (IGHV3-23)
AKGRPRFDY

SEQ ID NO: 2049 - protein, 8 aa, Homo sapiens
  Light chain CDR3 for antibody 1025 (IGKV1-NL1)
QQYYSTRT

SEQ ID NO: 2050 - protein, 21 aa, Homo sapiens
  Heavy chain CDR3 for antibody 1025 (IGHV4/OR15-8)
ARDRGRYYDSSGYEEMYAFDI

SEQ ID NO: 2051 - protein, 9 aa, Homo sapiens
  Light chain CDR3 for antibody 1026 (IGKV1-5)
QQYNSYPYT

SEQ ID NO: 2052 - protein, 13 aa, Homo sapiens
  Heavy chain CDR3 for antibody 1026 (IGHV4-61)
ARHAHSTVVLFDI

SEQ ID NO: 2053 - protein, 8 aa, Homo sapiens
  Light chain CDR3 for antibody 1027 (IGKV3-20)
QQYGSSPT

SEQ ID NO: 2054 - protein, 16 aa, Homo sapiens
  Heavy chain CDR3 for antibody 1027 (IGHV3-13)
ARGRTPAASFYYYMDV

SEQ ID NO: 2055 - protein, 9 aa, Homo sapiens
  Light chain CDR3 for antibody 1028 (IGKV1-39)
QQSHNTPWT

SEQ ID NO: 2056 - protein, 16 aa, Homo sapiens
  Heavy chain CDR3 for antibody 1028 (IGHV3-74)
VGAGTDSSGWYVSWNY

SEQ ID NO: 2057 - protein, 9 aa, Homo sapiens
  Light chain CDR3 for antibody 1029 (IGKV2D-28)
MQALQTPRT

SEQ ID NO: 2058 - protein, 17 aa, Homo sapiens
  Heavy chain CDR3 for antibody 1029 (IGHV3-33)
AKDKYEWGYDEPNYFDY

SEQ ID NO: 2059 - protein, 10 aa, Homo sapiens
  Light chain CDR3 for antibody 1030 (IGKV1-39)
QQSYSTPALT

SEQ ID NO: 2060 - protein, 21 aa, Homo sapiens
  Heavy chain CDR3 for antibody 1030 (IGHV4/OR15-8)
ARDRGRYYDSSGYEEMYAFDI

SEQ ID NO: 2061 - protein, 9 aa, Homo sapiens
  Light chain CDR3 for antibody 1031 (IGKV3-20)
QQCGSPPLS

SEQ ID NO: 2062 - protein, 6 aa, Homo sapiens
  Heavy chain CDR3 for antibody 1031 (IGHV3-7)
GVPGGY

SEQ ID NO: 2063 - protein, 9 aa, Homo sapiens
  Light chain CDR3 for antibody 1032 (IGKV1-39)
QQSYSTPPS

SEQ ID NO: 2064 - protein, 13 aa, Homo sapiens
  Heavy chain CDR3 for antibody 1032 (IGHV4-b)
ARSPRGDFYYFDY

SEQ ID NO: 2065 - protein, 9 aa, Homo sapiens
  Light chain CDR3 for antibody 1033 (IGKV3-20)
QQYGSSPPT

SEQ ID NO: 2066 - protein, 9 aa, Homo sapiens
  Heavy chain CDR3 for antibody 1033 (IGHV4/OR15-8)
ARVLGAMFT

SEQ ID NO: 2067 - protein, 9 aa, Homo sapiens
  Light chain CDR3 for antibody 1034 (IGKV6-21)
HQSSSLPYS

SEQ ID NO: 2068 - protein, 24 aa, Homo sapiens
  Heavy chain CDR3 for antibody 1034 (IGHV1-46)
AGPITMVRGVIIPDYYYYYYGMDV

SEQ ID NO: 2069 - protein, 10 aa, Homo sapiens
  Light chain CDR3 for antibody 1035 (IGKV1-39)
QQSYSTPALT

SEQ ID NO: 2070 - protein, 12 aa, Homo sapiens
  Heavy chain CDR3 for antibody 1035 (IGHV1-69)
ARWGDYYDSSDY

SEQ ID NO: 2071 - protein, 10 aa, Homo sapiens
  Light chain CDR3 for antibody 1036 (IGKV1-39)
QQSYSTLALT

SEQ ID NO: 2072 - protein, 15 aa, Homo sapiens
  Heavy chain CDR3 for antibody 1036 (IGHV5-51)
ARREAAAGTGIHLGY

SEQ ID NO: 2073 - protein, 9 aa, Homo sapiens
  Light chain CDR3 for antibody 1037 (IGKV1-33)
QQYDNLPYS

SEQ ID NO: 2074 - protein, 9 aa, Homo sapiens
  Heavy chain CDR3 for antibody 1037 (IGHV4/OR15-8)
ARVLGAMFT

SEQ ID NO: 2075 - protein, 9 aa, Homo sapiens
  Light chain CDR3 for antibody 1038 (IGKV6-21)
HQSSSLPYS

SEQ ID NO: 2076 - protein, 12 aa, Homo sapiens
  Heavy chain CDR3 for antibody 1038 (IGHV1-69)
ARWGDYYDSSDY

SEQ ID NO: 2077 - protein, 9 aa, Homo sapiens
  Light chain CDR3 for antibody 1039 (IGKV3-20)
QQYGSSPPT

SEQ ID NO: 2078 - protein, 13 aa, Homo sapiens
  Heavy chain CDR3 for antibody 1039 (IGHV1-18)
AREDGDYVVSFDY

SEQ ID NO: 2079 - protein, 9 aa, Homo sapiens
  Light chain CDR3 for antibody 1040 (IGKV3-20)
QQYGSSPPT

SEQ ID NO: 2080 - protein, 13 aa, Homo sapiens
  Heavy chain CDR3 for antibody 1040 (IGHV4-b)
ARSPRGDFYYFDY

SEQ ID NO: 2081 - protein, 9 aa, Homo sapiens
  Light chain CDR3 for antibody 1041 (IGKV3-11)
QQRSTWLWT

SEQ ID NO: 2082 - protein, 17 aa, Homo sapiens
  Heavy chain CDR3 for antibody 1041 (IGHV1-69)
ARGTFSGYSPTLHWFDP

SEQ ID NO: 2083 - protein, 9 aa, Homo sapiens
  Light chain CDR3 for antibody 1042 (IGKV3-20)
QQYGSSPWT

SEQ ID NO: 2084 - protein, 12 aa, Homo sapiens
  Heavy chain CDR3 for antibody 1042 (IGHV3-74)
VRDGVGDPPFDY

SEQ ID NO: 2085 - protein, 9 aa, Homo sapiens
  Light chain CDR3 for antibody 1043 (IGKV1D-12)
QQGNSFPFT

SEQ ID NO: 2086 - protein, 13 aa, Homo sapiens
  Heavy chain CDR3 for antibody 1043 (IGHV3-66)
EKEDWESQPAFDF

SEQ ID NO: 2087 - protein, 9 aa, Homo sapiens
  Light chain CDR3 for antibody 1044 (IGKV1-12)
QQANSFPYS

SEQ ID NO: 2088 - protein, 16 aa, Homo sapiens
  Heavy chain CDR3 for antibody 1044 (IGHV4-61)
ARDGSYSSSWKNWFDP

SEQ ID NO: 2089 - protein, 9 aa, Homo sapiens
  Light chain CDR3 for antibody 1045 (IGKV3-20)
QQYGSAPRT

SEQ ID NO: 2090 - protein, 13 aa, Homo sapiens
  Heavy chain CDR3 for antibody 1045 (IGHV4-39)
ARDARAWGVGFDY

SEQ ID NO: 2091 - protein, 9 aa, Homo sapiens
  Light chain CDR3 for antibody 1046 (IGKV1-17)
LQHNTYPLT

SEQ ID NO: 2092 - protein, 11 aa, Homo sapiens
  Heavy chain CDR3 for antibody 1046 (IGHV1-8)
ARVHSRLTSHY

SEQ ID NO: 2093 - protein, 9 aa, Homo sapiens
  Light chain CDR3 for antibody 1047 (IGKV1-33)
QQYHNLPLT

SEQ ID NO: 2094 - protein, 19 aa, Homo sapiens
  Heavy chain CDR3 for antibody 1047 (IGHV1-18)
ACEDRGGLPQGVLMYGLDV

SEQ ID NO: 2095 - protein, 9 aa, Homo sapiens
  Light chain CDR3 for antibody 1048 (IGKV1-39)
QQSYSSPPT

SEQ ID NO: 2096 - protein, 12 aa, Homo sapiens
  Heavy chain CDR3 for antibody 1048 (IGHV1-18)
ARGFPSYDVPDS

SEQ ID NO: 2097 - protein, 8 aa, Homo sapiens
  Light chain CDR3 for antibody 1049 (IGKV1-37)
QRTYNAPT

SEQ ID NO: 2098 - protein, 10 aa, Homo sapiens
  Heavy chain CDR3 for antibody 1049 (IGHV3-72)
VASILVIANY

SEQ ID NO: 2099 - protein, 9 aa, Homo sapiens
  Light chain CDR3 for antibody 1050 (IGKV1-33)
QQYDNLPYS

SEQ ID NO: 2100 - protein, 21 aa, Homo sapiens
  Heavy chain CDR3 for antibody 1050 (IGHV4/OR15-8)
ARDRGRYYDSSGYEEMYAFDI

SEQ ID NO: 2101 - protein, 9 aa, Homo sapiens
  Light chain CDR3 for antibody 1051 (IGKV1-12)
QQANSFPYS

SEQ ID NO: 2102 - protein, 24 aa, Homo sapiens
  Heavy chain CDR3 for antibody 1051 (IGHV1-46)
AGPITMVRGVIIPDYYYYYYGMDV

SEQ ID NO: 2103 - protein, 9 aa, Homo sapiens
  Light chain CDR3 for antibody 1052 (IGKV1-17)
QQHDAYPLT

SEQ ID NO: 2104 - protein, 10 aa, Homo sapiens
  Heavy chain CDR3 for antibody 1052 (IGHV1-2)
ASGGSGAPDD

SEQ ID NO: 2105 - protein, 10 aa, Homo sapiens
  Light chain CDR3 for antibody 1053 (IGKV3-11)
QQRSNWPPYT

SEQ ID NO: 2106 - protein, 12 aa, Homo sapiens
  Heavy chain CDR3 for antibody 1053 (IGHV3-h)
ARVVWDEYYFDY

SEQ ID NO: 2107 - protein, 9 aa, Homo sapiens
  Light chain CDR3 for antibody 1054 (IGKV3D-15)
QHYINWPYS

SEQ ID NO: 2108 - protein, 12 aa, Homo sapiens
  Heavy chain CDR3 for antibody 1054 (IGHV5-51)
AKNGDAGGYFDL

SEQ ID NO: 2109 - protein, 9 aa, Homo sapiens
  Light chain CDR3 for antibody 1055 (IGKV1-39)
QQSYSTPRD

SEQ ID NO: 2110 - protein, 15 aa, Homo sapiens
  Heavy chain CDR3 for antibody 1055 (IGHV1-18)
ARALWWGDYYYYMDV

SEQ ID NO: 2111 - protein, 9 aa, Homo sapiens
  Light chain CDR3 for antibody 1056 (IGKV3-11)
QQRSNWPMT

SEQ ID NO: 2112 - protein, 15 aa, Homo sapiens
  Heavy chain CDR3 for antibody 1056 (IGHV3-23)
AKDLTATRGSSGFDY

SEQ ID NO: 2113 - protein, 9 aa, Homo sapiens
  Light chain CDR3 for antibody 1057 (IGKV1-39)
QQSYSTPYS

SEQ ID NO: 2114 - protein, 18 aa, Homo sapiens
  Heavy chain CDR3 for antibody 1057 (IGHV3-13)
ARGVSSSWGYYYYYYMDV

SEQ ID NO: 2115 - protein, 9 aa, Homo sapiens
  Light chain CDR3 for antibody 1058 (IGKV6-21)
HQSSSLPYS

SEQ ID NO: 2116 - protein, 20 aa, Homo sapiens
  Heavy chain CDR3 for antibody 1058 (IGHV1-2)
ASGTYYYDSSGYYWNDAFDI

SEQ ID NO: 2117 - protein, 9 aa, Homo sapiens
  Light chain CDR3 for antibody 1059 (IGKV1-12)
QQANSFPFT

SEQ ID NO: 2118 - protein, 12 aa, Homo sapiens
  Heavy chain CDR3 for antibody 1059 (IGHV3-48)
ARDPTSSLALDV

SEQ ID NO: 2119 - protein, 9 aa, Homo sapiens
  Light chain CDR3 for antibody 1060 (IGKV1-9)
QQVNSYPHT

SEQ ID NO: 2120 - protein, 16 aa, Homo sapiens
  Heavy chain CDR3 for antibody 1060 (IGHV1-69)
AIGEIPLNYYYYGMDV

SEQ ID NO: 2121 - protein, 8 aa, Homo sapiens
  Light chain CDR3 for antibody 1061 (IGKV1-39)
QQSYSART

SEQ ID NO: 2122 - protein, 15 aa, Homo sapiens
  Heavy chain CDR3 for antibody 1061 (IGHV1-2)
ARVDYDNYYKSGMDV

SEQ ID NO: 2123 - protein, 8 aa, Homo sapiens
  Light chain CDR3 for antibody 1062 (IGKV3-20)
QQYGSSPT

SEQ ID NO: 2124 - protein, 20 aa, Homo sapiens
  Heavy chain CDR3 for antibody 1062 (IGHV4-39)
ARTGHLIRFLEWLPINWFDP

SEQ ID NO: 2125 - protein, 9 aa, Homo sapiens
  Light chain CDR3 for antibody 1063 (IGKV3-11)
QQRSNWQYT

SEQ ID NO: 2126 - protein, 13 aa, Homo sapiens
  Heavy chain CDR3 for antibody 1063 (IGHV1-f)
ATDGPLSGSLFDY

SEQ ID NO: 2127 - protein, 6 aa, Homo sapiens
  Light chain CDR3 for antibody 1064 (IGKV1-33)
QQYDRT

SEQ ID NO: 2128 - protein, 14 aa, Homo sapiens
  Heavy chain CDR3 for antibody 1064 (IGHV3-48)
AKKKGGYNQHAFDI

SEQ ID NO: 2129 - protein, 9 aa, Homo sapiens
  Light chain CDR3 for antibody 1065 (IGKV3-20)
QQYGSFLLT

SEQ ID NO: 2130 - protein, 24 aa, Homo sapiens
  Heavy chain CDR3 for antibody 1065 (IGHV1-46)
AGPITMVRGVIIPDYYYYYYGMDV

SEQ ID NO: 2131 - protein, 8 aa, Homo sapiens
  Light chain CDR3 for antibody 1066 (IGKV1-NL1)
QQYYTTPT

SEQ ID NO: 2132 - protein, 14 aa, Homo sapiens
  Heavy chain CDR3 for antibody 1066 (IGHV1-18)
ARGPQTFSITYLDY

SEQ ID NO: 2133 - protein, 10 aa, Homo sapiens
  Light chain CDR3 for antibody 1067 (IGKV3-20)
QQYGGSPPYT

SEQ ID NO: 2134 - protein, 17 aa, Homo sapiens
  Heavy chain CDR3 for antibody 1067 (IGHV1-46)
ARVIHSEFLGTYGHFDY

SEQ ID NO: 2135 - protein, 9 aa, Homo sapiens
  Light chain CDR3 for antibody 1068 (IGKV1-39)
QQSYSTPIT

SEQ ID NO: 2136 - protein, 14 aa, Homo sapiens
  Heavy chain CDR3 for antibody 1068 (IGHV3-9)
TKDKAAGAGTVGDY

SEQ ID NO: 2137 - protein, 9 aa, Homo sapiens
  Light chain CDR3 for antibody 1069 (IGKV1-39)
QQSYSTPYT

SEQ ID NO: 2138 - protein, 13 aa, Homo sapiens
  Heavy chain CDR3 for antibody 1069 (IGHV4-39)
ARRLSSSDNQFDY

SEQ ID NO: 2139 - protein, 10 aa, Homo sapiens
  Light chain CDR3 for antibody 1070 (IGKV1-39)
QQSYSTPPWT

SEQ ID NO: 2140 - protein, 11 aa, Homo sapiens
  Heavy chain CDR3 for antibody 1070 (IGHV3-53)
ARDLQVYGMDV

SEQ ID NO: 2141 - protein, 8 aa, Homo sapiens
  Light chain CDR3 for antibody 1071 (IGKV3-20)
QQYGSSPT

SEQ ID NO: 2142 - protein, 23 aa, Homo sapiens
  Heavy chain CDR3 for antibody 1071 (IGHV1-69)
ARESSDTGIAVAGPSYYYYYMDV

SEQ ID NO: 2143 - protein, 9 aa, Homo sapiens
  Light chain CDR3 for antibody 1072 (IGKV3-20)
QQYGSSPPT

SEQ ID NO: 2144 - protein, 12 aa, Homo sapiens
  Heavy chain CDR3 for antibody 1072 (IGHV1-2)
ASGTYYYDSSDY

SEQ ID NO: 2145 - protein, 9 aa, Homo sapiens
  Light chain CDR3 for antibody 1073 (IGKV1-12)
QQANSFPYS

SEQ ID NO: 2146 - protein, 20 aa, Homo sapiens
  Heavy chain CDR3 for antibody 1073 (IGHV5-51)
ARLGVEQQLPPHPNYYGMDV

SEQ ID NO: 2147 - protein, 9 aa, Homo sapiens
  Light chain CDR3 for antibody 1074 (IGKV1-39)
QQSYDTPVT

SEQ ID NO: 2148 - protein, 12 aa, Homo sapiens
  Heavy chain CDR3 for antibody 1074 (IGHV1-69)
ARDAELRRGMDV

SEQ ID NO: 2149 - protein, 8 aa, Homo sapiens
  Light chain CDR3 for antibody 1075 (IGKV1-NL1)
QQYYSTRT

SEQ ID NO: 2150 - protein, 20 aa, Homo sapiens
  Heavy chain CDR3 for antibody 1075 (IGHV1-2)
ASGTYYYDSSGYYWNDAFDI

SEQ ID NO: 2151 - protein, 10 aa, Homo sapiens
  Light chain CDR3 for antibody 1076 (IGKV1-33)
QQYDNLPPLT

SEQ ID NO: 2152 - protein, 8 aa, Homo sapiens
  Heavy chain CDR3 for antibody 1076 (IGHV3-21)
ARGRDFMI

SEQ ID NO: 2153 - protein, 10 aa, Homo sapiens
  Light chain CDR3 for antibody 1077 (IGKV1-39)
QQSYSTPPWT

SEQ ID NO: 2154 - protein, 11 aa, Homo sapiens
  Heavy chain CDR3 for antibody 1077 (IGHV1-2)
ARYTGLEAFDY

SEQ ID NO: 2155 - protein, 9 aa, Homo sapiens
  Light chain CDR3 for antibody 1078 (IGKV3-20)
QQYGSSPPT

SEQ ID NO: 2156 - protein, 21 aa, Homo sapiens
  Heavy chain CDR3 for antibody 1078 (IGHV4/OR15-8)
ARDRGRYYDSSGYEEMYAFDI

SEQ ID NO: 2157 - protein, 10 aa, Homo sapiens
  Light chain CDR3 for antibody 1079 (IGKV3-11)
HQRSTWPSIT

SEQ ID NO: 2158 - protein, 12 aa, Homo sapiens
  Heavy chain CDR3 for antibody 1079 (IGHV1-69)
ARDNPQIAASDY

SEQ ID NO: 2159 - protein, 8 aa, Homo sapiens
  Light chain CDR3 for antibody 1080 (IGKV3-20)
QQYGSSPT

SEQ ID NO: 2160 - protein, 12 aa, Homo sapiens
  Heavy chain CDR3 for antibody 1080 (IGHV3-53)
ARDLGSVGATDY

SEQ ID NO: 2161 - protein, 9 aa, Homo sapiens
  Light chain CDR3 for antibody 1081 (IGKV3-11)
QQRSNWQYT

SEQ ID NO: 2162 - protein, 19 aa, Homo sapiens
  Heavy chain CDR3 for antibody 1081 (IGHV1-2)
ARDFGEMGTSLYYYYALAV

SEQ ID NO: 2163 - protein, 10 aa, Homo sapiens
  Light chain CDR3 for antibody 1082 (IGKV1-39)
QQSYSTPPWT

SEQ ID NO: 2164 - protein, 16 aa, Homo sapiens
  Heavy chain CDR3 for antibody 1082 (IGHV3-13)
ARGVSSSWGYYYYMDV

SEQ ID NO: 2165 - protein, 9 aa, Homo sapiens
  Light chain CDR3 for antibody 1083 (IGKV1D-12)
QQAYSFPLT

SEQ ID NO: 2166 - protein, 11 aa, Homo sapiens
  Heavy chain CDR3 for antibody 1083 (IGHV3-33)
ARKPSGWWVDY

SEQ ID NO: 2167 - protein, 8 aa, Homo sapiens
  Light chain CDR3 for antibody 1084 (IGKV3-11)
QQRSNGLT

SEQ ID NO: 2168 - protein, 16 aa, Homo sapiens
  Heavy chain CDR3 for antibody 1084 (IGHV3-23)
AKPIAVAGDATRYFDY

SEQ ID NO: 2169 - protein, 6 aa, Homo sapiens
  Light chain CDR3 for antibody 1085 (IGKV1-39)
QQSYGP

SEQ ID NO: 2170 - protein, 14 aa, Homo sapiens
  Heavy chain CDR3 for antibody 1085 (IGHV1-69)
VRDNDYSDLDWFDP

SEQ ID NO: 2171 - protein, 8 aa, Homo sapiens
  Light chain CDR3 for antibody 1086 (IGKV1-NL1)
QQYYSTRT

SEQ ID NO: 2172 - protein, 13 aa, Homo sapiens
  Heavy chain CDR3 for antibody 1086 (IGHV4-b)
ARSPRGDFYYFDY

SEQ ID NO: 2173 - protein, 9 aa, Homo sapiens
  Light chain CDR3 for antibody 1087 (IGKV1-5)
QQSNIFPWT

SEQ ID NO: 2174 - protein, 10 aa, Homo sapiens
  Heavy chain CDR3 for antibody 1087 (IGHV4-39)
VVGVRGWFDT

SEQ ID NO: 2175 - protein, 10 aa, Homo sapiens
  Light chain CDR3 for antibody 1088 (IGKV1-39)
QQSYSTPQYT

SEQ ID NO: 2176 - protein, 16 aa, Homo sapiens
  Heavy chain CDR3 for antibody 1088 (IGHV3-74)
VGAGTDSSGWYVSWNY

SEQ ID NO: 2177 - protein, 10 aa, Homo sapiens
  Light chain CDR3 for antibody 1089 (IGKV3-20)
QGYTTPAMYT

SEQ ID NO: 2178 - protein, 10 aa, Homo sapiens
  Heavy chain CDR3 for antibody 1089 (IGHV4/OR15-8)
ASHSGYSQGS

SEQ ID NO: 2179 - protein, 8 aa, Homo sapiens
  Light chain CDR3 for antibody 1090 (IGKV1-NL1)
QQYYSTRT

SEQ ID NO: 2180 - protein, 16 aa, Homo sapiens
  Heavy chain CDR3 for antibody 1090 (IGHV4-61)
ARDGSYSSSWKNWFDP

SEQ ID NO: 2181 - protein, 8 aa, Homo sapiens
  Light chain CDR3 for antibody 1091 (IGKV1-NL1)
QQYYSTRT

SEQ ID NO: 2182 - protein, 12 aa, Homo sapiens
  Heavy chain CDR3 for antibody 1091 (IGHV1-69)
ARWGDYYDSSDY

SEQ ID NO: 2183 - protein, 9 aa, Homo sapiens
  Light chain CDR3 for antibody 1092 (IGKV1-39)
QQIYRVPIT

SEQ ID NO: 2184 - protein, 11 aa, Homo sapiens
  Heavy chain CDR3 for antibody 1092 (IGHV2-70)
ARSYYDYVLDY

SEQ ID NO: 2185 - protein, 9 aa, Homo sapiens
  Light chain CDR3 for antibody 1093 (IGKV3-20)
QQYGSSPQT

SEQ ID NO: 2186 - protein, 10 aa, Homo sapiens
  Heavy chain CDR3 for antibody 1093 (IGHV2-5)
AHQRTADIDY

SEQ ID NO: 2187 - protein, 9 aa, Homo sapiens
  Light chain CDR3 for antibody 1094 (IGKV1-12)
QQANSFPYS

SEQ ID NO: 2188 - protein, 20 aa, Homo sapiens
  Heavy chain CDR3 for antibody 1094 (IGHV1-2)
ASGTYYYDSSGYYWNDAFDI

SEQ ID NO: 2189 - protein, 9 aa, Homo sapiens
  Light chain CDR3 for antibody 1095 (IGKV2D-28)
MQALQTLYT

SEQ ID NO: 2190 - protein, 16 aa, Homo sapiens
  Heavy chain CDR3 for antibody 1095 (IGHV4-31)
ARAFRVGSTRGRGIDS

SEQ ID NO: 2191 - protein, 10 aa, Homo sapiens
  Light chain CDR3 for antibody 1096 (IGKV3-11)
QQRSNWPALT

SEQ ID NO: 2192 - protein, 17 aa, Homo sapiens
  Heavy chain CDR3 for antibody 1096 (IGHV4/OR15-8)
ARGKGWFGSHFPYYMDV

SEQ ID NO: 2193 - protein, 9 aa, Homo sapiens
  Light chain CDR3 for antibody 1097 (IGKV1-39)
QQSYNPPWT

SEQ ID NO: 2194 - protein, 14 aa, Homo sapiens
  Heavy chain CDR3 for antibody 1097 (IGHV1-2)
ARDEDSVVVTAISE

SEQ ID NO: 2195 - protein, 9 aa, Homo sapiens
  Light chain CDR3 for antibody 1098 (IGKV1-39)
QQSYSTPLT

SEQ ID NO: 2196 - protein, 19 aa, Homo sapiens
  Heavy chain CDR3 for antibody 1098 (IGHV1-3)
ARAGSPLRFLEWLSSFFDY

SEQ ID NO: 2197 - protein, 9 aa, Homo sapiens
  Light chain CDR3 for antibody 1099 (IGKV1-5)
QQYNTYPLT

SEQ ID NO: 2198 - protein, 18 aa, Homo sapiens
  Heavy chain CDR3 for antibody 1099 (IGHV1-69)
ARAKAYYSDNSGYSIFDS

SEQ ID NO: 2199 - protein, 9 aa, Homo sapiens
  Light chain CDR3 for antibody 1100 (IGKV1-39)
QQSYSTPYS

SEQ ID NO: 2200 - protein, 9 aa, Homo sapiens
  Heavy chain CDR3 for antibody 1100 (IGHV4/OR15-8)
ARVLGAMFT

SEQ ID NO: 2201 - protein, 9 aa, Homo sapiens
  Light chain CDR3 for antibody 1101 (IGKV3-20)
QHYGTSSYT

SEQ ID NO: 2202 - protein, 18 aa, Homo sapiens
  Heavy chain CDR3 for antibody 1101 (IGHV3-23)
AKDLRDSGSQNYYYGMDV

SEQ ID NO: 2203 - protein, 9 aa, Homo sapiens
  Light chain CDR3 for antibody 1102 (IGKV1-39)
QQSYSTPRT

SEQ ID NO: 2204 - protein, 11 aa, Homo sapiens
  Heavy chain CDR3 for antibody 1102 (IGHV2-70)
ARTTPAIAADY

SEQ ID NO: 2205 - protein, 9 aa, Homo sapiens
  Light chain CDR3 for antibody 1103 (IGKV1-39)
QQSYSTPRT

SEQ ID NO: 2206 - protein, 19 aa, Homo sapiens
  Heavy chain CDR3 for antibody 1103 (IGHV4-b)
ARQSYSGSYFARGADAFDI

SEQ ID NO: 2207 - protein, 9 aa, Homo sapiens
  Light chain CDR3 for antibody 1104 (IGKV1-39)
QQSYSTPYS

SEQ ID NO: 2208 - protein, 12 aa, Homo sapiens
  Heavy chain CDR3 for antibody 1104 (IGHV1-69)
ARWGDYYDSSDY

SEQ ID NO: 2209 - protein, 10 aa, Homo sapiens
  Light chain CDR3 for antibody 1105 (IGKV3-11)
QQRSNWPPWT

SEQ ID NO: 2210 - protein, 14 aa, Homo sapiens
  Heavy chain CDR3 for antibody 1105 (IGHV4-39)
ASPPYCSGGSCRDY

SEQ ID NO: 2211 - protein, 9 aa, Homo sapiens
  Light chain CDR3 for antibody 1106 (IGKV1-16)
QQYNTYPWT

SEQ ID NO: 2212 - protein, 16 aa, Homo sapiens
  Heavy chain CDR3 for antibody 1106 (IGHV4-30-2)
ARGYYDTKNYYSPLGD

SEQ ID NO: 2213 - protein, 8 aa, Homo sapiens
  Light chain CDR3 for antibody 1107 (IGKV3-20)
QQYGSSPT

SEQ ID NO: 2214 - protein, 11 aa, Homo sapiens
  Heavy chain CDR3 for antibody 1107 (IGHV3-53)
ARDLQVYGMDV

SEQ ID NO: 2215 - protein, 9 aa, Homo sapiens
  Light chain CDR3 for antibody 1108 (IGKV1-39)
QQSYSTPPS

SEQ ID NO: 2216 - protein, 21 aa, Homo sapiens
  Heavy chain CDR3 for antibody 1108 (IGHV4/OR15-8)
ARDRGRYYDSSGYEEMYAFDI

SEQ ID NO: 2217 - protein, 9 aa, Homo sapiens
  Light chain CDR3 for antibody 1109 (IGKV1-9)
QQLNSYPQT

SEQ ID NO: 2218 - protein, 18 aa, Homo sapiens
  Heavy chain CDR3 for antibody 1109 (IGHV3-13)
ARGVSSSWGYYYYYYMDV

SEQ ID NO: 2219 - protein, 10 aa, Homo sapiens
  Light chain CDR3 for antibody 1110 (IGKV1-5)
QQYNNYSALS

SEQ ID NO: 2220 - protein, 9 aa, Homo sapiens
  Heavy chain CDR3 for antibody 1110 (IGHV1-69)
ARGDTWFDY

SEQ ID NO: 2221 - protein, 9 aa, Homo sapiens
  Light chain CDR3 for antibody 1111 (IGKV1-6)
LQDYSFPLT

SEQ ID NO: 2222 - protein, 10 aa, Homo sapiens
  Heavy chain CDR3 for antibody 1111 (IGHV3-33)
ARTSSGWNDY

SEQ ID NO: 2223 - protein, 9 aa, Homo sapiens
  Light chain CDR3 for antibody 1112 (IGKV3-20)
QQYGSSPPT

SEQ ID NO: 2224 - protein, 16 aa, Homo sapiens
  Heavy chain CDR3 for antibody 1112 (IGHV3-13)
ARGRTPAASFYYYMDV

SEQ ID NO: 2225 - protein, 9 aa, Homo sapiens
  Light chain CDR3 for antibody 1113 (IGKV4-1)
QQYYGTPLT

SEQ ID NO: 2226 - protein, 18 aa, Homo sapiens
  Heavy chain CDR3 for antibody 1113 (IGHV5-51)
ARPYQGPGVAEGERDTDL

SEQ ID NO: 2227 - protein, 9 aa, Homo sapiens
  Light chain CDR3 for antibody 1114 (IGKV1-39)
QQSYSAPLA

SEQ ID NO: 2228 - protein, 16 aa, Homo sapiens
  Heavy chain CDR3 for antibody 1114 (IGHV3-30)
AKDGEYVSGWYEPIDS

SEQ ID NO: 2229 - protein, 8 aa, Homo sapiens
  Light chain CDR3 for antibody 1115 (IGKV3-20)
QQYEISQT

SEQ ID NO: 2230 - protein, 18 aa, Homo sapiens
  Heavy chain CDR3 for antibody 1115 (IGHV1-18)
ARDYYDSSGYYPKNPLDN

SEQ ID NO: 2231 - protein, 9 aa, Homo sapiens
  Light chain CDR3 for antibody 1116 (IGKV1-27)
QKYNSALLT

SEQ ID NO: 2232 - protein, 18 aa, Homo sapiens
  Heavy chain CDR3 for antibody 1116 (IGHV4-31)
ARDRYSTTPWDYSSGLDV

SEQ ID NO: 2233 - protein, 9 aa, Homo sapiens
  Light chain CDR3 for antibody 1117 (IGKV3-15)
QQYDNWPWT

SEQ ID NO: 2234 - protein, 10 aa, Homo sapiens
  Heavy chain CDR3 for antibody 1117 (IGHV2-5)
AYQRTANVDY

SEQ ID NO: 2235 - protein, 9 aa, Homo sapiens
  Light chain CDR3 for antibody 1118 (IGKV1-39)
QQSYSTLTT

SEQ ID NO: 2236 - protein, 15 aa, Homo sapiens
  Heavy chain CDR3 for antibody 1118 (IGHV1-18)
AREGGTSTRAYAFHI

SEQ ID NO: 2237 - protein, 10 aa, Homo sapiens
  Light chain CDR3 for antibody 1119 (IGKV1-39)
QRSRGSPPLA

SEQ ID NO: 2238 - protein, 19 aa, Homo sapiens
  Heavy chain CDR3 for antibody 1119 (IGHV4-b)
ARHTPFYYDTSGYYAPFDY

SEQ ID NO: 2239 - protein, 9 aa, Homo sapiens
  Light chain CDR3 for antibody 1120 (IGKV1-39)
QQSYSIPIT

SEQ ID NO: 2240 - protein, 24 aa, Homo sapiens
  Heavy chain CDR3 for antibody 1120 (IGHV6-1)
ATSYGVYSGGWHRWGFDYYYALDV

SEQ ID NO: 2241 - protein, 9 aa, Homo sapiens
  Light chain CDR3 for antibody 1121 (IGKV1-39)
QQSYSTPPS

SEQ ID NO: 2242 - protein, 13 aa, Homo sapiens
  Heavy chain CDR3 for antibody 1121 (IGHV1-18)
AREDGDYVVSFDY

SEQ ID NO: 2243 - protein, 9 aa, Homo sapiens
  Light chain CDR3 for antibody 1122 (IGKV1-33)
QQYDNLPYS

SEQ ID NO: 2244 - protein, 20 aa, Homo sapiens
  Heavy chain CDR3 for antibody 1122 (IGHV1-2)
ASGTYYYDSSGYYWNDAFDI

SEQ ID NO: 2245 - protein, 8 aa, Homo sapiens
  Light chain CDR3 for antibody 1123 (IGKV1-NL1)
QQYYSTRT

SEQ ID NO: 2246 - protein, 18 aa, Homo sapiens
  Heavy chain CDR3 for antibody 1123 (IGHV3-13)
ARGVSSSWGYYYYYYMDV

SEQ ID NO: 2247 - protein, 9 aa, Homo sapiens
  Light chain CDR3 for antibody 1124 (IGKV1-27)
QKYNSAPHT

SEQ ID NO: 2248 - protein, 19 aa, Homo sapiens
  Heavy chain CDR3 for antibody 1124 (IGHV1-3)
ARAGSPLRFLEWLSSFFDY

SEQ ID NO: 2249 - protein, 9 aa, Homo sapiens
  Light chain CDR3 for antibody 1125 (IGKV3-20)
QQYGSSPPT

SEQ ID NO: 2250 - protein, 15 aa, Homo sapiens
  Heavy chain CDR3 for antibody 1125 (IGHV1-69)
ARFANYYDSRTGIDY

SEQ ID NO: 2251 - protein, 9 aa, Homo sapiens
  Light chain CDR3 for antibody 1126 (IGKV1-39)
QQSYSIPLT

SEQ ID NO: 2252 - protein, 21 aa, Homo sapiens
  Heavy chain CDR3 for antibody 1126 (IGHV4-31)
AREPCSGGVCRYPRPGDWFDP

SEQ ID NO: 2253 - protein, 10 aa, Homo sapiens
  Light chain CDR3 for antibody 1127 (IGKV3-11)
QQRSNWPPGT

SEQ ID NO: 2254 - protein, 17 aa, Homo sapiens
  Heavy chain CDR3 for antibody 1127 (IGHV1-69)
ARLGYCDSISCFDGMDV

SEQ ID NO: 2255 - protein, 9 aa, Homo sapiens
  Light chain CDR3 for antibody 1128 (IGKV1-12)
QQANSFPQT

SEQ ID NO: 2256 - protein, 11 aa, Homo sapiens
  Heavy chain CDR3 for antibody 1128 (IGHV1-69)
ATWGEWELIVY

SEQ ID NO: 2257 - protein, 9 aa, Homo sapiens
  Light chain CDR3 for antibody 1129 (IGKV1-39)
HQTYDTPQT

SEQ ID NO: 2258 - protein, 12 aa, Homo sapiens
  Heavy chain CDR3 for antibody 1129 (IGHV1-69)
ARDARLRGGMDV

SEQ ID NO: 2259 - protein, 10 aa, Homo sapiens
  Light chain CDR3 for antibody 1130 (IGKV1-39)
QQSYSTPPWT

SEQ ID NO: 2260 - protein, 22 aa, Homo sapiens
  Heavy chain CDR3 for antibody 1130 (IGHV3-66)
ARAHQKRIAAAGTNYYYYYMDV

SEQ ID NO: 2261 - protein, 11 aa, Homo sapiens
  Light chain CDR3 for antibody 1131 (IGKV1-39)
QQSYSNPPEDS

SEQ ID NO: 2262 - protein, 18 aa, Homo sapiens
  Heavy chain CDR3 for antibody 1131 (IGHV3-13)
ARGVSSSWGYYYYYYMDV

SEQ ID NO: 2263 - protein, 9 aa, Homo sapiens
  Light chain CDR3 for antibody 1132 (IGKV1-33)
QQYDNLPYS

SEQ ID NO: 2264 - protein, 24 aa, Homo sapiens
  Heavy chain CDR3 for antibody 1132 (IGHV1-46)
AGPITMVRGVIIPDYYYYYYGMDV

SEQ ID NO: 2265 - protein, 9 aa, Homo sapiens
  Light chain CDR3 for antibody 1133 (IGKV1-39)
QQSFTSPVT

SEQ ID NO: 2266 - protein, 13 aa, Homo sapiens
  Heavy chain CDR3 for antibody 1133 (IGHV2-5)
AHRRRRFLDAFHY

SEQ ID NO: 2267 - protein, 9 aa, Homo sapiens
  Light chain CDR3 for antibody 1134 (IGKV1-5)
QQYNSYSDT

SEQ ID NO: 2268 - protein, 13 aa, Homo sapiens
  Heavy chain CDR3 for antibody 1134 (IGHV1-8)
ARGDYYDSSGYDY

SEQ ID NO: 2269 - protein, 9 aa, Homo sapiens
  Light chain CDR3 for antibody 1135 (IGKV3-11)
QQRSTWLWT

SEQ ID NO: 2270 - protein, 9 aa, Homo sapiens
  Heavy chain CDR3 for antibody 1135 (IGHV1-18)
AKTGGISEH

SEQ ID NO: 2271 - protein, 10 aa, Homo sapiens
  Light chain CDR3 for antibody 1136 (IGKV1-39)
QQSYSTSMYT

SEQ ID NO: 2272 - protein, 25 aa, Homo sapiens
  Heavy chain CDR3 for antibody 1136 (IGHV4-b)
ARIHVDIVATILLGGYSYGYVYFDY

SEQ ID NO: 2273 - protein, 9 aa, Homo sapiens
  Light chain CDR3 for antibody 1137 (IGKV3-20)
HQYGSSPRT

SEQ ID NO: 2274 - protein, 19 aa, Homo sapiens
  Heavy chain CDR3 for antibody 1137 (IGHV4-59)
ARGRYYYDSNGVYWEWFDP

SEQ ID NO: 2275 - protein, 10 aa, Homo sapiens
  Light chain CDR3 for antibody 1138 (IGKV1-39)
QQSYSTLTWT

SEQ ID NO: 2276 - protein, 16 aa, Homo sapiens
  Heavy chain CDR3 for antibody 1138 (IGHV3-33)
VSYRPVYGYYRGRFDY

SEQ ID NO: 2277 - protein, 9 aa, Homo sapiens
  Light chain CDR3 for antibody 1139 (IGKV4-1)
QQYYSTPLT

SEQ ID NO: 2278 - protein, 11 aa, Homo sapiens
  Heavy chain CDR3 for antibody 1139 (IGHV1-58)
AAARGSYSFQH

SEQ ID NO: 2279 - protein, 9 aa, Homo sapiens
  Light chain CDR3 for antibody 1140 (IGKV3-20)
QHYGSSSYT

SEQ ID NO: 2280 - protein, 18 aa, Homo sapiens
  Heavy chain CDR3 for antibody 1140 (IGHV1-69)
AKERSSGWNGPAHYGMDV

SEQ ID NO: 2281 - protein, 8 aa, Homo sapiens
  Light chain CDR3 for antibody 1141 (IGKV3-20)
QQYGSSRS

SEQ ID NO: 2282 - protein, 20 aa, Homo sapiens
  Heavy chain CDR3 for antibody 1141 (IGHV1-69)
ARWGDYYDSSGYYWNDAFDI

SEQ ID NO: 2283 - protein, 9 aa, Homo sapiens
  Light chain CDR3 for antibody 1142 (IGKV1-33)
QQYDNLPYS

SEQ ID NO: 2284 - protein, 12 aa, Homo sapiens
  Heavy chain CDR3 for antibody 1142 (IGHV1-69)
ARWGDYYDSSDY

SEQ ID NO: 2285 - protein, 9 aa, Homo sapiens
  Light chain CDR3 for antibody 1143 (IGKV1-27)
QKYNSAPPV

SEQ ID NO: 2286 - protein, 16 aa, Homo sapiens
  Heavy chain CDR3 for antibody 1143 (IGHV1-2)
VREAPRVTATWRWFDV

SEQ ID NO: 2287 - protein, 9 aa, Homo sapiens
  Light chain CDR3 for antibody 1144 (IGKV1-39)
QQSYSTPRD

SEQ ID NO: 2288 - protein, 16 aa, Homo sapiens
  Heavy chain CDR3 for antibody 1144 (IGHV1-69)
AIGEIPLNYYYYGMDV

SEQ ID NO: 2289 - protein, 8 aa, Homo sapiens
  Light chain CDR3 for antibody 1145 (IGKV1-NL1)
QQYYSTRT

SEQ ID NO: 2290 - protein, 16 aa, Homo sapiens
  Heavy chain CDR3 for antibody 1145 (IGHV3-13)
ARGRTPAASFYYYMDV

SEQ ID NO: 2291 - protein, 9 aa, Homo sapiens
  Light chain CDR3 for antibody 1146 (IGKV3-20)
QQYGSSPPT

SEQ ID NO: 2292 - protein, 15 aa, Homo sapiens
  Heavy chain CDR3 for antibody 1146 (IGHV1-69)
ARRDIGSGWSSHFDY

SEQ ID NO: 2293 - protein, 9 aa, Homo sapiens
  Light chain CDR3 for antibody 1147 (IGKV1-33)
QQCHDLPYT

SEQ ID NO: 2294 - protein, 14 aa, Homo sapiens
  Heavy chain CDR3 for antibody 1147 (IGHV1-69)
ARDRDNWNRGFLDF

SEQ ID NO: 2295 - protein, 8 aa, Homo sapiens
  Light chain CDR3 for antibody 1148 (IGKV3-20)
QQYGSSPS

SEQ ID NO: 2296 - protein, 22 aa, Homo sapiens
  Heavy chain CDR3 for antibody 1148 (IGHV3-66)
ARAHQKRIAAAGTNYYYYYMDV

SEQ ID NO: 2297 - protein, 9 aa, Homo sapiens
  Light chain CDR3 for antibody 1149 (IGKV2D-28)
MQALQTSFT

SEQ ID NO: 2298 - protein, 20 aa, Homo sapiens
  Heavy chain CDR3 for antibody 1149 (IGHV5-51)
ARLGVEQQLPPHPNYYGMDV

SEQ ID NO: 2299 - protein, 8 aa, Homo sapiens
  Light chain CDR3 for antibody 1150 (IGKV1-5)
QQYNSPLT

SEQ ID NO: 2300 - protein, 12 aa, Homo sapiens
  Heavy chain CDR3 for antibody 1150 (IGHV4-b)
ARGGWLQFPFNY

SEQ ID NO: 2301 - protein, 9 aa, Homo sapiens
  Light chain CDR3 for antibody 1151 (IGKV3-20)
HQYGSSPIT

SEQ ID NO: 2302 - protein, 17 aa, Homo sapiens
  Heavy chain CDR3 for antibody 1151 (IGHV1-18)
ARALGKAVLGPGAVPDF

SEQ ID NO: 2303 - protein, 11 aa, Homo sapiens
  Light chain CDR3 for antibody 1152 (IGKV3-11)
QQRSNWPPALT

SEQ ID NO: 2304 - protein, 10 aa, Homo sapiens
  Heavy chain CDR3 for antibody 1152 (IGHV1-69)
AGNRDGSFDY

SEQ ID NO: 2305 - protein, 8 aa, Homo sapiens
  Light chain CDR3 for antibody 1153 (IGKV3-20)
QQYGSSRS

SEQ ID NO: 2306 - protein, 20 aa, Homo sapiens
  Heavy chain CDR3 for antibody 1153 (IGHV1-2)
ASGTYYYDSSGYYWNDSFDI

SEQ ID NO: 2307 - protein, 9 aa, Homo sapiens
  Light chain CDR3 for antibody 1154 (IGKV1-9)
QQLNSYPLT

SEQ ID NO: 2308 - protein, 15 aa, Homo sapiens
  Heavy chain CDR3 for antibody 1154 (IGHV1-2)
ARGIRYDSRGTYFDY

SEQ ID NO: 2309 - protein, 9 aa, Homo sapiens
  Light chain CDR3 for antibody 1155 (IGKV1-33)
QQYDNLPYS

SEQ ID NO: 2310 - protein, 20 aa, Homo sapiens
  Heavy chain CDR3 for antibody 1155 (IGHV5-51)
ARLGVEQQLPPHPNYYGMDV

SEQ ID NO: 2311 - protein, 9 aa, Homo sapiens
  Light chain CDR3 for antibody 1156 (IGKV1-16)
QQYHGYPLT

SEQ ID NO: 2312 - protein, 17 aa, Homo sapiens
  Heavy chain CDR3 for antibody 1156 (IGHV3-30)
AKASQFFWFGESRLTDY

SEQ ID NO: 2313 - protein, 9 aa, Homo sapiens
  Light chain CDR3 for antibody 1157 (IGKV2-30)
MQATHWPRM

SEQ ID NO: 2314 - protein, 8 aa, Homo sapiens
  Heavy chain CDR3 for antibody 1157 (IGHV3-48)
ARMNNMDV

SEQ ID NO: 2315 - protein, 9 aa, Homo sapiens
  Light chain CDR3 for antibody 1158 (IGKV1-12)
QQANSFPQT

SEQ ID NO: 2316 - protein, 14 aa, Homo sapiens
  Heavy chain CDR3 for antibody 1158 (IGHV1-69)
ATGFGGASGSWVDP

SEQ ID NO: 2317 - protein, 9 aa, Homo sapiens
  Light chain CDR3 for antibody 1159 (IGKV1-27)
QRYNGDPRT

SEQ ID NO: 2318 - protein, 12 aa, Homo sapiens
  Heavy chain CDR3 for antibody 1159 (IGHV3-33)
AKDRRGYSELDS

SEQ ID NO: 2319 - protein, 9 aa, Homo sapiens
  Light chain CDR3 for antibody 1160 (IGKV3-20)
QLYGSSPYT

SEQ ID NO: 2320 - protein, 19 aa, Homo sapiens
  Heavy chain CDR3 for antibody 1160 (IGHV3-23)
AKGEGYNGNYYYYYYAMDV

SEQ ID NO: 2321 - protein, 9 aa, Homo sapiens
  Light chain CDR3 for antibody 1161 (IGKV1-12)
QQANSFPLT

SEQ ID NO: 2322 - protein, 9 aa, Homo sapiens
  Heavy chain CDR3 for antibody 1161 (IGHV4-30-2)
VRGQDTFDI

SEQ ID NO: 2323 - protein, 9 aa, Homo sapiens
  Light chain CDR3 for antibody 1162 (IGKV1-33)
QHYDNSPFT

SEQ ID NO: 2324 - protein, 14 aa, Homo sapiens
  Heavy chain CDR3 for antibody 1162 (IGHV1-18)
AIPQINYGSGTYRD

SEQ ID NO: 2325 - protein, 10 aa, Homo sapiens
  Light chain CDR3 for antibody 1163 (IGKV1-39)
QQSFDTPPFT

SEQ ID NO: 2326 - protein, 17 aa, Homo sapiens
  Heavy chain CDR3 for antibody 1163 (IGHV3-21)
VRGELCTGGVCLGDFDH

SEQ ID NO: 2327 - protein, 9 aa, Homo sapiens
  Light chain CDR3 for antibody 1164 (IGKV1-39)
QQSYSTPPS

SEQ ID NO: 2328 - protein, 16 aa, Homo sapiens
  Heavy chain CDR3 for antibody 1164 (IGHV4-61)
ARDGSYSSSWKNWFDP

SEQ ID NO: 2329 - protein, 9 aa, Homo sapiens
  Light chain CDR3 for antibody 1165 (IGKV3-20)
HQYGSSPRT

SEQ ID NO: 2330 - protein, 15 aa, Homo sapiens
  Heavy chain CDR3 for antibody 1165 (IGHV1-24)
ATESAVGVVIYALVF

SEQ ID NO: 2331 - protein, 8 aa, Homo sapiens
  Light chain CDR3 for antibody 1166 (IGKV1-27)
QSYYSALA

SEQ ID NO: 2332 - protein, 16 aa, Homo sapiens
  Heavy chain CDR3 for antibody 1166 (IGHV5-51)
ARHRRVYSSPFDSFDI

SEQ ID NO: 2333 - protein, 9 aa, Homo sapiens
  Light chain CDR3 for antibody 1167 (IGKV1-39)
QQSYSTPPS

SEQ ID NO: 2334 - protein, 16 aa, Homo sapiens
  Heavy chain CDR3 for antibody 1167 (IGHV3-13)
ARGRTPAASFYYYMDV

SEQ ID NO: 2335 - protein, 9 aa, Homo sapiens
  Light chain CDR3 for antibody 1168 (IGKV1-39)
QQSYSTPLT

SEQ ID NO: 2336 - protein, 10 aa, Homo sapiens
  Heavy chain CDR3 for antibody 1168 (IGHV5-51)
ARHSGRNLDY

SEQ ID NO: 2337 - protein, 11 aa, Homo sapiens
  Light chain CDR3 for antibody 1169 (IGKV3-20)
QQYGSSPVMYT

SEQ ID NO: 2338 - protein, 20 aa, Homo sapiens
  Heavy chain CDR3 for antibody 1169 (IGHV5-51)
ARRRWGTSSSSKGRVYYFDY

SEQ ID NO: 2339 - protein, 10 aa, Homo sapiens
  Light chain CDR3 for antibody 1170 (IGKV3-20)
QQYGSSPSST

SEQ ID NO: 2340 - protein, 20 aa, Homo sapiens
  Heavy chain CDR3 for antibody 1170 (IGHV4-59)
ARGSDLRYFDWSYYYYGMDV

SEQ ID NO: 2341 - protein, 9 aa, Homo sapiens
  Light chain CDR3 for antibody 1171 (IGKV4-1)
QQYYSSPLT

SEQ ID NO: 2342 - protein, 17 aa, Homo sapiens
  Heavy chain CDR3 for antibody 1171 (IGHV1-46)
ARGRDQGNHGRHAFFDS

SEQ ID NO: 2343 - protein, 9 aa, Homo sapiens
  Light chain CDR3 for antibody 1172 (IGKV1-39)
QQSYSTPPS

SEQ ID NO: 2344 - protein, 16 aa, Homo sapiens
  Heavy chain CDR3 for antibody 1172 (IGHV5-51)
ARLQPPPYYYYYGMDV

SEQ ID NO: 2345 - protein, 10 aa, Homo sapiens
  Light chain CDR3 for antibody 1173 (IGKV1-12)
QQANSFLSLT

SEQ ID NO: 2346 - protein, 24 aa, Homo sapiens
  Heavy chain CDR3 for antibody 1173 (IGHV1-46)
ARDQAGLPSPRGYSYGYYYYGMDV

SEQ ID NO: 2347 - protein, 11 aa, Homo sapiens
  Light chain CDR3 for antibody 1174 (IGKV1-39)
QQSYSNPPEDS

SEQ ID NO: 2348 - protein, 21 aa, Homo sapiens
  Heavy chain CDR3 for antibody 1174 (IGHV3-13)
ARAHQKRIAAAGTNYYYYMDV

SEQ ID NO: 2349 - protein, 8 aa, Homo sapiens
  Light chain CDR3 for antibody 1175 (IGKV3-20)
QQYGSSPT

SEQ ID NO: 2350 - protein, 20 aa, Homo sapiens
  Heavy chain CDR3 for antibody 1175 (IGHV3-64)
AKTAGPYCSGGSCYSGNVDY

SEQ ID NO: 2351 - protein, 10 aa, Homo sapiens
  Light chain CDR3 for antibody 1176 (IGKV1-13)
QQFNSYPPLT

SEQ ID NO: 2352 - protein, 20 aa, Homo sapiens
  Heavy chain CDR3 for antibody 1176 (IGHV1-2)
ASGTYYYDSSGYYWNDAFDI

SEQ ID NO: 2353 - protein, 9 aa, Homo sapiens
  Light chain CDR3 for antibody 1177 (IGKV3-20)
QQYSNTPWT

SEQ ID NO: 2354 - protein, 15 aa, Homo sapiens
  Heavy chain CDR3 for antibody 1177 (IGHV1-2)
SAVGRGPWFGELFIP

SEQ ID NO: 2355 - protein, 10 aa, Homo sapiens
  Light chain CDR3 for antibody 1178 (IGKV1-13)
QQFNSYPPLT

SEQ ID NO: 2356 - protein, 18 aa, Homo sapiens
  Heavy chain CDR3 for antibody 1178 (IGHV3-13)
ARGVSSSWGYYYYYYMDV

SEQ ID NO: 2357 - protein, 9 aa, Homo sapiens
  Light chain CDR3 for antibody 1179 (IGKV3-20)
QQYGSSPPT

SEQ ID NO: 2358 - protein, 12 aa, Homo sapiens
  Heavy chain CDR3 for antibody 1179 (IGHV3-33)
AKDYPGNGYWVY

SEQ ID NO: 2359 - protein, 9 aa, Homo sapiens
  Light chain CDR3 for antibody 1180 (IGKV1-12)
QQANSFPLT

SEQ ID NO: 2360 - protein, 11 aa, Homo sapiens
  Heavy chain CDR3 for antibody 1180 (IGHV4-61)
TGHTGWHHSDY

SEQ ID NO: 2361 - protein, 9 aa, Homo sapiens
  Light chain CDR3 for antibody 1181 (IGKV1-12)
QQANSFPYS

SEQ ID NO: 2362 - protein, 12 aa, Homo sapiens
  Heavy chain CDR3 for antibody 1181 (IGHV1-69)
ARWGDYYDSSDY

SEQ ID NO: 2363 - protein, 9 aa, Homo sapiens
  Light chain CDR3 for antibody 1182 (IGKV1-17)
LQHHNYPIT

SEQ ID NO: 2364 - protein, 17 aa, Homo sapiens
  Heavy chain CDR3 for antibody 1182 (IGHV3-66)
ATAGEIRATIGNPLIDY

SEQ ID NO: 2365 - protein, 9 aa, Homo sapiens
  Light chain CDR3 for antibody 1183 (IGKV3-20)
QQYGSSPPT

SEQ ID NO: 2366 - protein, 16 aa, Homo sapiens
  Heavy chain CDR3 for antibody 1183 (IGHV4-61)
ARDGSYSSSWKNWFDP

SEQ ID NO: 2367 - protein, 10 aa, Homo sapiens
  Light chain CDR3 for antibody 1184 (IGKV1-39)
QQSYSTPPWT

SEQ ID NO: 2368 - protein, 15 aa, Homo sapiens
  Heavy chain CDR3 for antibody 1184 (IGHV1-69)
ARRDIGSGWSSHFDY

SEQ ID NO: 2369 - protein, 6 aa, Homo sapiens
  Light chain CDR3 for antibody 1185 (IGKV3-20)
QQGGMT

SEQ ID NO: 2370 - protein, 13 aa, Homo sapiens
  Heavy chain CDR3 for antibody 1185 (IGHV1-69)
AVPWDGSGWSFDH

SEQ ID NO: 2371 - protein, 9 aa, Homo sapiens
  Light chain CDR3 for antibody 1186 (IGKV3-20)
QQYGSSPWT

SEQ ID NO: 2372 - protein, 10 aa, Homo sapiens
  Heavy chain CDR3 for antibody 1186 (IGHV3-74)
TSNGYYSLEF

SEQ ID NO: 2373 - protein, 10 aa, Homo sapiens
  Light chain CDR3 for antibody 1187 (IGKV1-13)
QQFNSYPPLT

SEQ ID NO: 2374 - protein, 24 aa, Homo sapiens
  Heavy chain CDR3 for antibody 1187 (IGHV1-46)
AGPITMVRGVIIPDYYYYYYGMDV

SEQ ID NO: 2375 - protein, 11 aa, Homo sapiens
  Light chain CDR3 for antibody 1188 (IGKV1-33)
QQYDNLPPFLT

SEQ ID NO: 2376 - protein, 11 aa, Homo sapiens
  Heavy chain CDR3 for antibody 1188 (IGHV4-39)
ARGLLTYYFDY

SEQ ID NO: 2377 - protein, 9 aa, Homo sapiens
  Light chain CDR3 for antibody 1189 (IGKV3-20)
QSYGDSPYT

SEQ ID NO: 2378 - protein, 11 aa, Homo sapiens
  Heavy chain CDR3 for antibody 1189 (IGHV3-33)
ARDSAVLGFDP

SEQ ID NO: 2379 - protein, 8 aa, Homo sapiens
  Light chain CDR3 for antibody 1190 (IGKV1-NL1)
QQYYSTRT

SEQ ID NO: 2380 - protein, 20 aa, Homo sapiens
  Heavy chain CDR3 for antibody 1190 (IGHV5-51)
ARLGVEQQLPPHPNYYGMDV

SEQ ID NO: 2381 - protein, 8 aa, Homo sapiens
  Light chain CDR3 for antibody 1191 (IGKV3-20)
QQYEISQT

SEQ ID NO: 2382 - protein, 23 aa, Homo sapiens
  Heavy chain CDR3 for antibody 1191 (IGHV1-46)
ARDRDAVVVAATGSGISNYGMDV

SEQ ID NO: 2383 - protein, 9 aa, Homo sapiens
  Light chain CDR3 for antibody 1192 (IGKV3-15)
QQYYDWPWT

SEQ ID NO: 2384 - protein, 20 aa, Homo sapiens
  Heavy chain CDR3 for antibody 1192 (IGHV1-18)
ARAGDSERYYYEGYNYYMDV

SEQ ID NO: 2385 - protein, 8 aa, Homo sapiens
  Light chain CDR3 for antibody 1193 (IGKV3-20)
QQYGSSPT

SEQ ID NO: 2386 - protein, 12 aa, Homo sapiens
  Heavy chain CDR3 for antibody 1193 (IGHV1-69)
ARWGDYYDSSDY

SEQ ID NO: 2387 - protein, 9 aa, Homo sapiens
  Light chain CDR3 for antibody 1194 (IGKV1-33)
QQYDNLPYS

SEQ ID NO: 2388 - protein, 20 aa, Homo sapiens
  Heavy chain CDR3 for antibody 1194 (IGHV4-39)
ARTGHLIRFLEWLPINWFDP

SEQ ID NO: 2389 - protein, 8 aa, Homo sapiens
  Light chain CDR3 for antibody 1195 (IGKV3-20)
QQYGSSPT

SEQ ID NO: 2390 - protein, 24 aa, Homo sapiens
  Heavy chain CDR3 for antibody 1195 (IGHV1-46)
ARPITMVRGVIIPDYCYYYYGMDV

SEQ ID NO: 2391 - protein, 9 aa, Homo sapiens
  Light chain CDR3 for antibody 1196 (IGKV3-20)
QQYGSSPPT

SEQ ID NO: 2392 - protein, 11 aa, Homo sapiens
  Heavy chain CDR3 for antibody 1196 (IGHV3-53)
ARDLQVYGMDV

SEQ ID NO: 2393 - protein, 9 aa, Homo sapiens
  Light chain CDR3 for antibody 1197 (IGKV1-39)
QQSYSTPPS

SEQ ID NO: 2394 - protein, 22 aa, Homo sapiens
  Heavy chain CDR3 for antibody 1197 (IGHV3-66)
ARALQKRIAAAGTNYYYYYMDV

SEQ ID NO: 2395 - protein, 9 aa, Homo sapiens
  Light chain CDR3 for antibody 1198 (IGKV1-9)
QQLNSYPQT

SEQ ID NO: 2396 - protein, 9 aa, Homo sapiens
  Heavy chain CDR3 for antibody 1198 (IGHV4/OR15-8)
ARVLGAMFT

SEQ ID NO: 2397 - protein, 8 aa, Homo sapiens
  Light chain CDR3 for antibody 1199 (IGKV1-NL1)
QQYYSTRT

SEQ ID NO: 2398 - protein, 11 aa, Homo sapiens
  Heavy chain CDR3 for antibody 1199 (IGHV3-53)
ARDLQVYGMDV

SEQ ID NO: 2399 - protein, 9 aa, Homo sapiens
  Light chain CDR3 for antibody 1200 (IGKV3-20)
QQYGSSPLT

SEQ ID NO: 2400 - protein, 19 aa, Homo sapiens
  Heavy chain CDR3 for antibody 1200 (IGHV4-b)
ARHRPTTIFGVVIIDYMDV

SEQ ID NO: 2401 - protein, 9 aa, Homo sapiens
  Light chain CDR3 for antibody 1201 (IGKV1-33)
QHYDDFPLT

SEQ ID NO: 2402 - protein, 16 aa, Homo sapiens
  Heavy chain CDR3 for antibody 1201 (IGHV4-b)
AKVRTLVGLTFGAFDV

SEQ ID NO: 2403 - protein, 8 aa, Homo sapiens
  Light chain CDR3 for antibody 1202 (IGKV3-20)
QQYGSSRS

SEQ ID NO: 2404 - protein, 24 aa, Homo sapiens
  Heavy chain CDR3 for antibody 1202 (IGHV1-46)
AGPITMVRGVIIPDYYYYYYGMDV

SEQ ID NO: 2405 - protein, 10 aa, Homo sapiens
  Light chain CDR3 for antibody 1203 (IGKV3-20)
QQYGSSPSLT

SEQ ID NO: 2406 - protein, 24 aa, Homo sapiens
  Heavy chain CDR3 for antibody 1203 (IGHV3-11)
ARDPFYGSGSYIFWVHYYYYYMDV

SEQ ID NO: 2407 - protein, 9 aa, Homo sapiens
  Light chain CDR3 for antibody 1204 (IGKV1-33)
QQYDNLPYS

SEQ ID NO: 2408 - protein, 18 aa, Homo sapiens
  Heavy chain CDR3 for antibody 1204 (IGHV3-13)
ARGVSSSWGYYYYYYMDV

SEQ ID NO: 2409 - protein, 9 aa, Homo sapiens
  Light chain CDR3 for antibody 1205 (IGKV3-20)
QQYGSSPPT

SEQ ID NO: 2410 - protein, 20 aa, Homo sapiens
  Heavy chain CDR3 for antibody 1205 (IGHV5-51)
ARLGVEQQLPPHPNYYGMDV

SEQ ID NO: 2411 - protein, 9 aa, Homo sapiens
  Light chain CDR3 for antibody 1206 (IGKV1-9)
QQLNSYPQT

SEQ ID NO: 2412 - protein, 24 aa, Homo sapiens
  Heavy chain CDR3 for antibody 1206 (IGHV1-46)
AGPITMVRGVIIPDYYYYYYGMDV

SEQ ID NO: 2413 - protein, 9 aa, Homo sapiens
  Light chain CDR3 for antibody 1207 (IGKV1-12)
QQANSFPYS

SEQ ID NO: 2414 - protein, 18 aa, Homo sapiens
  Heavy chain CDR3 for antibody 1207 (IGHV3-13)
ARGVSSSWGYYYYYYMDV

SEQ ID NO: 2415 - protein, 9 aa, Homo sapiens
  Light chain CDR3 for antibody 1208 (IGKV1-33)
QHYDNLSLT

SEQ ID NO: 2416 - protein, 16 aa, Homo sapiens
  Heavy chain CDR3 for antibody 1208 (IGHV1-46)
AGPPLLRGYMFGSLGN

SEQ ID NO: 2417 - protein, 10 aa, Homo sapiens
  Light chain CDR3 for antibody 1209 (IGKV5-2)
LQHDNFHTWT

SEQ ID NO: 2418 - protein, 12 aa, Homo sapiens
  Heavy chain CDR3 for antibody 1209 (IGHV3-30)
TKDLSPTKVWDY

SEQ ID NO: 2419 - protein, 9 aa, Homo sapiens
  Light chain CDR3 for antibody 1210 (IGKV3-20)
QQYGSSPPT

SEQ ID NO: 2420 - protein, 23 aa, Homo sapiens
  Heavy chain CDR3 for antibody 1210 (IGHV1-69)
ARESSDTGIAVAGPSYYYYYMDV

SEQ ID NO: 2421 - protein, 10 aa, Homo sapiens
  Light chain CDR3 for antibody 1211 (IGKV1-39)
QQSYSTPALT

SEQ ID NO: 2422 - protein, 20 aa, Homo sapiens
  Heavy chain CDR3 for antibody 1211 (IGHV4-39)
ARTGHLIRFLEWLPINWFDP

SEQ ID NO: 2423 - protein, 11 aa, Homo sapiens
  Light chain CDR3 for antibody 1212 (IGKV1-39)
QQSYSNPPEDS

SEQ ID NO: 2424 - protein, 12 aa, Homo sapiens
  Heavy chain CDR3 for antibody 1212 (IGHV1-69)
ARWGDYYDSSDY

SEQ ID NO: 2425 - protein, 8 aa, Homo sapiens
  Light chain CDR3 for antibody 1213 (IGKV3-20)
QQYGSSPT

SEQ ID NO: 2426 - protein, 24 aa, Homo sapiens
  Heavy chain CDR3 for antibody 1213 (IGHV1-46)
ARPITMVRRVIIPDYYYYYYGMDV

SEQ ID NO: 2427 - protein, 9 aa, Homo sapiens
  Light chain CDR3 for antibody 1214 (IGKV1-9)
QQLNSYPQT

SEQ ID NO: 2428 - protein, 12 aa, Homo sapiens
  Heavy chain CDR3 for antibody 1214 (IGHV3-53)
ARDLGSVGATDY

SEQ ID NO: 2429 - protein, 10 aa, Homo sapiens
  Light chain CDR3 for antibody 1215 (IGKV1-39)
QQSYTSPRWT

SEQ ID NO: 2430 - protein, 8 aa, Homo sapiens
  Heavy chain CDR3 for antibody 1215 (IGHV4-39)
ATVAGIYY

SEQ ID NO: 2431 - protein, 8 aa, Homo sapiens
  Light chain CDR3 for antibody 1216 (IGKV3-20)
QQYGSSRS

SEQ ID NO: 2432 - protein, 24 aa, Homo sapiens
  Heavy chain CDR3 for antibody 1216 (IGHV1-69)
AGPITMVRRVIIPDYYYYYYCMDV

SEQ ID NO: 2433 - protein, 8 aa, Homo sapiens
  Light chain CDR3 for antibody 1217 (IGKV1-NL1)
QQYYSTRT

SEQ ID NO: 2434 - protein, 12 aa, Homo sapiens
  Heavy chain CDR3 for antibody 1217 (IGHV3-33)
AKDYPGNGYWVY

SEQ ID NO: 2435 - protein, 11 aa, Homo sapiens
  Light chain CDR3 for antibody 1218 (IGKV1-39)
QQSYSNPPEDS

SEQ ID NO: 2436 - protein, 17 aa, Homo sapiens
  Heavy chain CDR3 for antibody 1218 (IGHV3-13)
ARGVSSSWGYYYYYMDV

SEQ ID NO: 2437 - protein, 10 aa, Homo sapiens
  Light chain CDR3 for antibody 1219 (IGKV1-37)
QRTYNAPPYS

SEQ ID NO: 2438 - protein, 19 aa, Homo sapiens
  Heavy chain CDR3 for antibody 1219 (IGHV4-31)
ARDRDEATIFGYYYYGMDV

SEQ ID NO: 2439 - protein, 9 aa, Homo sapiens
  Light chain CDR3 for antibody 1220 (IGKV3-20)
QHYGSSSYT

SEQ ID NO: 2440 - protein, 24 aa, Homo sapiens
  Heavy chain CDR3 for antibody 1220 (IGHV1-46)
AGPITMVRGVIIPDYYYYYYGMDV

SEQ ID NO: 2441 - protein, 10 aa, Homo sapiens
  Light chain CDR3 for antibody 1221 (IGKV1-39)
QQSYSTPPWT

SEQ ID NO: 2442 - protein, 12 aa, Homo sapiens
  Heavy chain CDR3 for antibody 1221 (IGHV3-53)
ARDLGSVGATDY

SEQ ID NO: 2443 - protein, 9 aa, Homo sapiens
  Light chain CDR3 for antibody 1222 (IGKV1-12)
QQAKSLPLT

SEQ ID NO: 2444 - protein, 23 aa, Homo sapiens
  Heavy chain CDR3 for antibody 1222 (IGHV5-51)
ARHEVEEQQVSSHFYDYYYGLDV

SEQ ID NO: 2445 - protein, 9 aa, Homo sapiens
  Light chain CDR3 for antibody 1223 (IGKV3-20)
QQYGSSPLT

SEQ ID NO: 2446 - protein, 19 aa, Homo sapiens
  Heavy chain CDR3 for antibody 1223 (IGHV1-69)
ARVSRYGGSGSYYTTRFDY

SEQ ID NO: 2447 - protein, 8 aa, Homo sapiens
  Light chain CDR3 for antibody 1224 (IGKV3-20)
QQYGSSPT

SEQ ID NO: 2448 - protein, 24 aa, Homo sapiens
  Heavy chain CDR3 for antibody 1224 (IGHV1-46)
AAPITMVRGVIIPDYYYYYYGMHV

SEQ ID NO: 2449 - protein, 9 aa, Homo sapiens
  Light chain CDR3 for antibody 1225 (IGKV3-20)
QQYGSSPLT

SEQ ID NO: 2450 - protein, 11 aa, Homo sapiens
  Heavy chain CDR3 for antibody 1225 (IGHV1-69)
ARDDSLLPLGY

SEQ ID NO: 2451 - protein, 8 aa, Homo sapiens
  Light chain CDR3 for antibody 1226 (IGKV3-20)
QQYGSSPT

SEQ ID NO: 2452 - protein, 8 aa, Homo sapiens
  Heavy chain CDR3 for antibody 1226 (IGHV1-8)
ARGRVADY

SEQ ID NO: 2453 - protein, 9 aa, Homo sapiens
  Light chain CDR3 for antibody 1227 (IGKV2-30)
MQGTHWPPS

SEQ ID NO: 2454 - protein, 20 aa, Homo sapiens
  Heavy chain CDR3 for antibody 1227 (IGHV1-18)
ARDGTIYDYGDYRALDAFDI

SEQ ID NO: 2455 - protein, 10 aa, Homo sapiens
  Light chain CDR3 for antibody 1228 (IGKV1-39)
QQSYITPLYS

SEQ ID NO: 2456 - protein, 22 aa, Homo sapiens
  Heavy chain CDR3 for antibody 1228 (IGHV3-66)
ARAHQKRIAAAGTNYYYYYMDV

SEQ ID NO: 2457 - protein, 9 aa, Homo sapiens
  Light chain CDR3 for antibody 1229 (IGKV1-9)
QQLNSYPQT

SEQ ID NO: 2458 - protein, 12 aa, Homo sapiens
  Heavy chain CDR3 for antibody 1229 (IGHV1-69)
ARWGDYYDSSDY

SEQ ID NO: 2459 - protein, 10 aa, Homo sapiens
  Light chain CDR3 for antibody 1230 (IGKV1-9)
QQLNSYPPLT

SEQ ID NO: 2460 - protein, 21 aa, Homo sapiens
  Heavy chain CDR3 for antibody 1230 (IGHV4/OR15-8)
ARDRGRYYDSSGYEEMYAFDI

SEQ ID NO: 2461 - protein, 9 aa, Homo sapiens
  Light chain CDR3 for antibody 1231 (IGKV1-39)
QQSYSTPPS

SEQ ID NO: 2462 - protein, 11 aa, Homo sapiens
  Heavy chain CDR3 for antibody 1231 (IGHV3-53)
ARDLQVYGMDV

SEQ ID NO: 2463 - protein, 9 aa, Homo sapiens
  Light chain CDR3 for antibody 1232 (IGKV6-21)
HQSSSLPYS

SEQ ID NO: 2464 - protein, 16 aa, Homo sapiens
  Heavy chain CDR3 for antibody 1232 (IGHV4-61)
ARDGSYSSSWKNWFDP

SEQ ID NO: 2465 - protein, 10 aa, Homo sapiens
  Light chain CDR3 for antibody 1233 (IGKV1-33)
QQYDNLPSIT

SEQ ID NO: 2466 - protein, 18 aa, Homo sapiens
  Heavy chain CDR3 for antibody 1233 (IGHV1-69)
ARGLMVQGVIITGDAFDI

SEQ ID NO: 2467 - protein, 9 aa, Homo sapiens
  Light chain CDR3 for antibody 1234 (IGKV1-33)
QQYDNLPYS

SEQ ID NO: 2468 - protein, 12 aa, Homo sapiens
  Heavy chain CDR3 for antibody 1234 (IGHV3-33)
AKDYPGNGYWVY

SEQ ID NO: 2469 - protein, 10 aa, Homo sapiens
  Light chain CDR3 for antibody 1235 (IGKV1-13)
QQFNSYPPLT

SEQ ID NO: 2470 - protein, 12 aa, Homo sapiens
  Heavy chain CDR3 for antibody 1235 (IGHV1-69)
ARWGDYYDSSDY

SEQ ID NO: 2471 - protein, 9 aa, Homo sapiens
  Light chain CDR3 for antibody 1236 (IGKV3-20)
QQYGSFLLT

SEQ ID NO: 2472 - protein, 20 aa, Homo sapiens
  Heavy chain CDR3 for antibody 1236 (IGHV1-2)
ASGTYYYDSSGYYWNDAFDI

SEQ ID NO: 2473 - protein, 9 aa, Homo sapiens
  Light chain CDR3 for antibody 1237 (IGKV4-1)
QQYYTTPRT

SEQ ID NO: 2474 - protein, 24 aa, Homo sapiens
  Heavy chain CDR3 for antibody 1237 (IGHV4-61)
ARDLDCSGGYCYSSPDPGIYNMHV

SEQ ID NO: 2475 - protein, 9 aa, Homo sapiens
  Light chain CDR3 for antibody 1238 (IGKV1-17)
LQHNSYPWT

SEQ ID NO: 2476 - protein, 15 aa, Homo sapiens
  Heavy chain CDR3 for antibody 1238 (IGHV4-34)
ARETHSYPNYYGMDV

SEQ ID NO: 2477 - protein, 8 aa, Homo sapiens
  Light chain CDR3 for antibody 1239 (IGKV3-20)
QQYGSSPT

SEQ ID NO: 2478 - protein, 24 aa, Homo sapiens
  Heavy chain CDR3 for antibody 1239 (IGHV1-46)
ARPITMVREVIIPDYYYYYYGMDV

SEQ ID NO: 2479 - protein, 10 aa, Homo sapiens
  Light chain CDR3 for antibody 1240 (IGKV1-39)
QQSYSTPPWT

SEQ ID NO: 2480 - protein, 12 aa, Homo sapiens
  Heavy chain CDR3 for antibody 1240 (IGHV3-33)
AKDYPGNGYWVY

SEQ ID NO: 2481 - protein, 10 aa, Homo sapiens
  Light chain CDR3 for antibody 1241 (IGKV1-9)
QQLNGYPPFT

SEQ ID NO: 2482 - protein, 19 aa, Homo sapiens
  Heavy chain CDR3 for antibody 1241 (IGHV4-34)
ARAKDSSDLNTYYYYAMDV

SEQ ID NO: 2483 - protein, 9 aa, Homo sapiens
  Light chain CDR3 for antibody 1242 (IGKV1-27)
QKYNSAPWP

SEQ ID NO: 2484 - protein, 21 aa, Homo sapiens
  Heavy chain CDR3 for antibody 1242 (IGHV1-46)
ARGRTYYDVLTGSVASYYFDY

SEQ ID NO: 2485 - protein, 8 aa, Homo sapiens
  Light chain CDR3 for antibody 1243 (IGKV3-20)
QQYGSSPT

SEQ ID NO: 2486 - protein, 21 aa, Homo sapiens
  Heavy chain CDR3 for antibody 1243 (IGHV1-2)
AREIFSMTVVVDPTGYYGMDV

SEQ ID NO: 2487 - protein, 10 aa, Homo sapiens
  Light chain CDR3 for antibody 1244 (IGKV1-39)
QQSYSTPPWT

SEQ ID NO: 2488 - protein, 18 aa, Homo sapiens
  Heavy chain CDR3 for antibody 1244 (IGHV3-33)
AKDGAAMARGYYYYGMDV

SEQ ID NO: 2489 - protein, 9 aa, Homo sapiens
  Light chain CDR3 for antibody 1245 (IGKV1-5)
QQYNSFPIT

SEQ ID NO: 2490 - protein, 9 aa, Homo sapiens
  Heavy chain CDR3 for antibody 1245 (IGHV3-74)
ARGQYGDYS

SEQ ID NO: 2491 - protein, 9 aa, Homo sapiens
  Light chain CDR3 for antibody 1246 (IGKV1-39)
QQSYSAPLA

SEQ ID NO: 2492 - protein, 16 aa, Homo sapiens
  Heavy chain CDR3 for antibody 1246 (IGHV1-18)
ARYLFGFGEVLTPFDY

SEQ ID NO: 2493 - protein, 9 aa, Homo sapiens
  Light chain CDR3 for antibody 1247 (IGKV1-39)
QQTYSTQWT

SEQ ID NO: 2494 - protein, 14 aa, Homo sapiens
  Heavy chain CDR3 for antibody 1247 (IGHV1-69)
ARGASSGNYYYFGY

SEQ ID NO: 2495 - protein, 8 aa, Homo sapiens
  Light chain CDR3 for antibody 1248 (IGKV3-20)
QQYGSSPT

SEQ ID NO: 2496 - protein, 18 aa, Homo sapiens
  Heavy chain CDR3 for antibody 1248 (IGHV3-33)
AKDGAAMARGYYYYGMDV

SEQ ID NO: 2497 - protein, 9 aa, Homo sapiens
  Light chain CDR3 for antibody 1249 (IGKV1-12)
QQANSFPRT

SEQ ID NO: 2498 - protein, 26 aa, Homo sapiens
  Heavy chain CDR3 for antibody 1249 (IGHV4-34)
ARGSGYYDSSGYYWDVLHSVTYYFDY

SEQ ID NO: 2499 - protein, 8 aa, Homo sapiens
  Light chain CDR3 for antibody 1250 (IGKV3-20)
QQYGSSPT

SEQ ID NO: 2500 - protein, 24 aa, Homo sapiens
  Heavy chain CDR3 for antibody 1250 (IGHV1-69)
AGTITMVRGVIIADYYYYYDGMDV

SEQ ID NO: 2501 - protein, 8 aa, Homo sapiens
  Light chain CDR3 for antibody 1251 (IGKV3-20)
QQYGSSRS

SEQ ID NO: 2502 - protein, 12 aa, Homo sapiens
  Heavy chain CDR3 for antibody 1251 (IGHV3-53)
ARWGDYYEGIDY

SEQ ID NO: 2503 - protein, 10 aa, Homo sapiens
  Light chain CDR3 for antibody 1252 (IGKV1-9)
QQLNSYPPLT

SEQ ID NO: 2504 - protein, 13 aa, Homo sapiens
  Heavy chain CDR3 for antibody 1252 (IGHV4-b)
ARSPRGDFYYFDY

SEQ ID NO: 2505 - protein, 9 aa, Homo sapiens
  Light chain CDR3 for antibody 1253 (IGKV1-9)
QQLNSYPLT

SEQ ID NO: 2506 - protein, 16 aa, Homo sapiens
  Heavy chain CDR3 for antibody 1253 (IGHV1-8)
ARVGGYDILPNQPLDY

SEQ ID NO: 2507 - protein, 9 aa, Homo sapiens
  Light chain CDR3 for antibody 1254 (IGKV3-20)
QQYGSFLLT

SEQ ID NO: 2508 - protein, 18 aa, Homo sapiens
  Heavy chain CDR3 for antibody 1254 (IGHV3-13)
ARGVSSSWGYYYYYYMDV

SEQ ID NO: 2509 - protein, 8 aa, Homo sapiens
  Light chain CDR3 for antibody 1255 (IGKV3-20)
QQYGSSPT

SEQ ID NO: 2510 - protein, 24 aa, Homo sapiens
  Heavy chain CDR3 for antibody 1255 (IGHV1-69)
AGPITRVSGVIIPDYYYYYYGMNV

SEQ ID NO: 2511 - protein, 9 aa, Homo sapiens
  Light chain CDR3 for antibody 1256 (IGKV1-33)
QQYDNLPYS

SEQ ID NO: 2512 - protein, 15 aa, Homo sapiens
  Heavy chain CDR3 for antibody 1256 (IGHV1-69)
ARRDIGSGWSSHFDY

SEQ ID NO: 2513 - protein, 10 aa, Homo sapiens
  Light chain CDR3 for antibody 1257 (IGKV1-39)
QQSYSTPPWT

SEQ ID NO: 2514 - protein, 16 aa, Homo sapiens
  Heavy chain CDR3 for antibody 1257 (IGHV3-13)
ARVTYDSSGYLHWFDP

SEQ ID NO: 2515 - protein, 10 aa, Homo sapiens
  Light chain CDR3 for antibody 1258 (IGKV1-39)
QQSYSTPALT

SEQ ID NO: 2516 - protein, 13 aa, Homo sapiens
  Heavy chain CDR3 for antibody 1258 (IGHV1-18)
AREDGDYVVSFDY

SEQ ID NO: 2517 - protein, 8 aa, Homo sapiens
  Light chain CDR3 for antibody 1259 (IGKV3-20)
QQYGSSPS

SEQ ID NO: 2518 - protein, 15 aa, Homo sapiens
  Heavy chain CDR3 for antibody 1259 (IGHV1-69)
ARYTGDGYNRGDFDY

SEQ ID NO: 2519 - protein, 9 aa, Homo sapiens
  Light chain CDR3 for antibody 1260 (IGKV1-12)
QQANSFPYS

SEQ ID NO: 2520 - protein, 12 aa, Homo sapiens
  Heavy chain CDR3 for antibody 1260 (IGHV3-53)
ARDLGSVGATDY

SEQ ID NO: 2521 - protein, 10 aa, Homo sapiens
  Light chain CDR3 for antibody 1261 (IGKV1-39)
QQSYSTPPWT

SEQ ID NO: 2522 - protein, 7 aa, Homo sapiens
  Heavy chain CDR3 for antibody 1261 (IGHV3-13)
ARGVSSS

SEQ ID NO: 2523 - protein, 9 aa, Homo sapiens
  Light chain CDR3 for antibody 1262 (IGKV3-20)
QQYGSSPQT

SEQ ID NO: 2524 - protein, 13 aa, Homo sapiens
  Heavy chain CDR3 for antibody 1262 (IGHV1-69)
ARSDDYGGNSEGY

SEQ ID NO: 2525 - protein, 9 aa, Homo sapiens
  Light chain CDR3 for antibody 1263 (IGKV1-39)
QQSYSAPLA

SEQ ID NO: 2526 - protein, 15 aa, Homo sapiens
  Heavy chain CDR3 for antibody 1263 (IGHV1-24)
ATESAVGVVIYALVF

SEQ ID NO: 2527 - protein, 8 aa, Homo sapiens
  Light chain CDR3 for antibody 1264 (IGKV3-20)
QQYGSSPS

SEQ ID NO: 2528 - protein, 10 aa, Homo sapiens
  Heavy chain CDR3 for antibody 1264 (IGHV2-5)
AHQRTADIDY

SEQ ID NO: 2529 - protein, 9 aa, Homo sapiens
  Light chain CDR3 for antibody 1265 (IGKV1-12)
QQANSFPYS

SEQ ID NO: 2530 - protein, 16 aa, Homo sapiens
  Heavy chain CDR3 for antibody 1265 (IGHV3-13)
ARGRTPAASFYYYMDV

SEQ ID NO: 2531 - protein, 10 aa, Homo sapiens
  Light chain CDR3 for antibody 1266 (IGKV1-39)
QQSYSTPPWT

SEQ ID NO: 2532 - protein, 8 aa, Homo sapiens
  Heavy chain CDR3 for antibody 1266 (IGHV1-8)
ARGRVADY

SEQ ID NO: 2533 - protein, 10 aa, Homo sapiens
  Light chain CDR3 for antibody 1267 (IGKV1-39)
QQSYITPLYS

SEQ ID NO: 2534 - protein, 16 aa, Homo sapiens
  Heavy chain CDR3 for antibody 1267 (IGHV3-13)
ARGRTPAASFYYYMDV

SEQ ID NO: 2535 - protein, 10 aa, Homo sapiens
  Light chain CDR3 for antibody 1268 (IGKV1-39)
QQSYSTPALT

SEQ ID NO: 2536 - protein, 15 aa, Homo sapiens
  Heavy chain CDR3 for antibody 1268 (IGHV1-69)
ARFANYYDSRTGIDY

SEQ ID NO: 2537 - protein, 8 aa, Homo sapiens
  Light chain CDR3 for antibody 1269 (IGKV1-NL1)
QQYYSTRT

SEQ ID NO: 2538 - protein, 22 aa, Homo sapiens
  Heavy chain CDR3 for antibody 1269 (IGHV3-66)
ARAHQKRIAAAGTNYYYYYMDV

SEQ ID NO: 2539 - protein, 9 aa, Homo sapiens
  Light chain CDR3 for antibody 1270 (IGKV1-12)
QQANSFPYS

SEQ ID NO: 2540 - protein, 15 aa, Homo sapiens
  Heavy chain CDR3 for antibody 1270 (IGHV1-69)
ARRDIGIGWSSHFDY

SEQ ID NO: 2541 - protein, 9 aa, Homo sapiens
  Light chain CDR3 for antibody 1271 (IGKV6-21)
HQSSSLPYS

SEQ ID NO: 2542 - protein, 21 aa, Homo sapiens
  Heavy chain CDR3 for antibody 1271 (IGHV4/OR15-8)
ARDRGRYYDSSGYEEMYAFDI

SEQ ID NO: 2543 - protein, 10 aa, Homo sapiens
  Light chain CDR3 for antibody 1272 (IGKV1-39)
QQSYSTPALT

SEQ ID NO: 2544 - protein, 24 aa, Homo sapiens
  Heavy chain CDR3 for antibody 1272 (IGHV1-46)
AGPITMVRGVIIPDYYYYYYGIDV

SEQ ID NO: 2545 - protein, 9 aa, Homo sapiens
  Light chain CDR3 for antibody 1273 (IGKV6-21)
HQSSSLPYS

SEQ ID NO: 2546 - protein, 20 aa, Homo sapiens
  Heavy chain CDR3 for antibody 1273 (IGHV5-51)
ARLGVEQQLPPHPNYYGMDV

SEQ ID NO: 2547 - protein, 8 aa, Homo sapiens
  Light chain CDR3 for antibody 1274 (IGKV3-20)
QQYGSSPT

SEQ ID NO: 2548 - protein, 24 aa, Homo sapiens
  Heavy chain CDR3 for antibody 1274 (IGHV1-69)
AGTITKVRGVIIPDYYYYYYGMDD

SEQ ID NO: 2549 - protein, 9 aa, Homo sapiens
  Light chain CDR3 for antibody 1275 (IGKV1-12)
QQAKSVPWT

SEQ ID NO: 2550 - protein, 15 aa, Homo sapiens
  Heavy chain CDR3 for antibody 1275 (IGHV3-33)
ARDSGIVGALFYFDF

SEQ ID NO: 2551 - protein, 9 aa, Homo sapiens
  Light chain CDR3 for antibody 1276 (IGKV1-6)
LQDYNYPLT

SEQ ID NO: 2552 - protein, 12 aa, Homo sapiens
  Heavy chain CDR3 for antibody 1276 (IGHV4-34)
ARVRGNRGNFDY

SEQ ID NO: 2553 - protein, 8 aa, Homo sapiens
  Light chain CDR3 for antibody 1277 (IGKV3-11)
QQGRNWLT

SEQ ID NO: 2554 - protein, 17 aa, Homo sapiens
  Heavy chain CDR3 for antibody 1277 (IGHV1-46)
ANSYCIGSTCYNNWFDP

SEQ ID NO: 2555 - protein, 11 aa, Homo sapiens
  Light chain CDR3 for antibody 1278 (IGKV3-15)
QQYNNWPPMYT

SEQ ID NO: 2556 - protein, 12 aa, Homo sapiens
  Heavy chain CDR3 for antibody 1278 (IGHV1-69)
ARWGDYYDSSDY

SEQ ID NO: 2557 - protein, 8 aa, Homo sapiens
  Light chain CDR3 for antibody 1279 (IGKV3-20)
QQYGSSPT

SEQ ID NO: 2558 - protein, 24 aa, Homo sapiens
  Heavy chain CDR3 for antibody 1279 (IGHV1-f)
AAPITMVRGVIIPDYYHHYGGMDV

SEQ ID NO: 2559 - protein, 9 aa, Homo sapiens
  Light chain CDR3 for antibody 1280 (IGKV2D-28)
MQALQTSFT

SEQ ID NO: 2560 - protein, 13 aa, Homo sapiens
  Heavy chain CDR3 for antibody 1280 (IGHV4-b)
ARSPRGDFYYFDY

SEQ ID NO: 2561 - protein, 8 aa, Homo sapiens
  Light chain CDR3 for antibody 1281 (IGKV3-20)
QQYGSSPT

SEQ ID NO: 2562 - protein, 24 aa, Homo sapiens
  Heavy chain CDR3 for antibody 1281 (IGHV1-46)
AGPITMARGVILPEYYYYYYGMDA

SEQ ID NO: 2563 - protein, 9 aa, Homo sapiens
  Light chain CDR3 for antibody 1282 (IGKV3-20)
QQYGSFLLT

SEQ ID NO: 2564 - protein, 21 aa, Homo sapiens
  Heavy chain CDR3 for antibody 1282 (IGHV4/OR15-8)
ARDRGRYYDSSGYEEMYAFDI

SEQ ID NO: 2565 - protein, 8 aa, Homo sapiens
  Light chain CDR3 for antibody 1283 (IGKV3-20)
QQYGSSPT

SEQ ID NO: 2566 - protein, 24 aa, Homo sapiens
  Heavy chain CDR3 for antibody 1283 (IGHV1-46)
AGPSTMVRGVIIRDYYYYYYGIDV

SEQ ID NO: 2567 - protein, 10 aa, Homo sapiens
  Light chain CDR3 for antibody 1284 (IGKV1-9)
QQLNSYPRST

SEQ ID NO: 2568 - protein, 10 aa, Homo sapiens
  Heavy chain CDR3 for antibody 1284 (IGHV3-30)
ARDSGGQFDP

SEQ ID NO: 2569 - protein, 9 aa, Homo sapiens
  Light chain CDR3 for antibody 1285 (IGKV1-39)
QQSYTPGVT

SEQ ID NO: 2570 - protein, 16 aa, Homo sapiens
  Heavy chain CDR3 for antibody 1285 (IGHV1-2)
ARDPEGVTGGLYYFDY

SEQ ID NO: 2571 - protein, 10 aa, Homo sapiens
  Light chain CDR3 for antibody 1286 (IGKV1-13)
QQFNSYPPLT

SEQ ID NO: 2572 - protein, 16 aa, Homo sapiens
  Heavy chain CDR3 for antibody 1286 (IGHV3-13)
ARGRTPAASFYYYMDV

SEQ ID NO: 2573 - protein, 10 aa, Homo sapiens
  Light chain CDR3 for antibody 1287 (IGKV1-39)
QQSYSTPALT

SEQ ID NO: 2574 - protein, 20 aa, Homo sapiens
  Heavy chain CDR3 for antibody 1287 (IGHV5-51)
ARIGVEQQLPPHPNYYGMDV

SEQ ID NO: 2575 - protein, 8 aa, Homo sapiens
  Light chain CDR3 for antibody 1288 (IGKV3-20)
QQYGSSRS

SEQ ID NO: 2576 - protein, 17 aa, Homo sapiens
  Heavy chain CDR3 for antibody 1288 (IGHV3-23)
AKSHYCSGGRCYSVFDS

SEQ ID NO: 2577 - protein, 9 aa, Homo sapiens
  Light chain CDR3 for antibody 1289 (IGKV1-9)
QQLNSYPQT

SEQ ID NO: 2578 - protein, 18 aa, Homo sapiens
  Heavy chain CDR3 for antibody 1289 (IGHV3-33)
AKDGAAMARGYYYYGMDV

SEQ ID NO: 2579 - protein, 11 aa, Homo sapiens
  Light chain CDR3 for antibody 1290 (IGKV3-15)
QQYNNWPPMYT

SEQ ID NO: 2580 - protein, 20 aa, Homo sapiens
  Heavy chain CDR3 for antibody 1290 (IGHV1-2)
ASGTYYYDSSGYYWNDAFDI

SEQ ID NO: 2581 - protein, 8 aa, Homo sapiens
  Light chain CDR3 for antibody 1291 (IGKV3-11)
QQRSNWPT

SEQ ID NO: 2582 - protein, 20 aa, Homo sapiens
  Heavy chain CDR3 for antibody 1291 (IGHV1-2)
ASGTYYYDSSGYYWNDAFDI

SEQ ID NO: 2583 - protein, 9 aa, Homo sapiens
  Light chain CDR3 for antibody 1292 (IGKV1-39)
QQSYSTPPS

SEQ ID NO: 2584 - protein, 20 aa, Homo sapiens
  Heavy chain CDR3 for antibody 1292 (IGHV5-51)
ASLGVEQKLPPHPNYYGMDV

SEQ ID NO: 2585 - protein, 9 aa, Homo sapiens
  Light chain CDR3 for antibody 1293 (IGKV3-20)
QQYGSFLLT

SEQ ID NO: 2586 - protein, 15 aa, Homo sapiens
  Heavy chain CDR3 for antibody 1293 (IGHV1-69)
ARFANYYDSRTGIDY

SEQ ID NO: 2587 - protein, 9 aa, Homo sapiens
  Light chain CDR3 for antibody 1294 (IGKV1-39)
QQSYSTPWT

SEQ ID NO: 2588 - protein, 19 aa, Homo sapiens
  Heavy chain CDR3 for antibody 1294 (IGHV1-8)
ARGGDYVWGSYRQGGWFDP

SEQ ID NO: 2589 - protein, 8 aa, Homo sapiens
  Light chain CDR3 for antibody 1295 (IGKV3-20)
QQYGSSPT

SEQ ID NO: 2590 - protein, 24 aa, Homo sapiens
  Heavy chain CDR3 for antibody 1295 (IGHV1-46)
AGPITMVRGVIIPDYYHYYYGMHA

SEQ ID NO: 2591 - protein, 9 aa, Homo sapiens
  Light chain CDR3 for antibody 1296 (IGKV1-39)
QQSHSIPRT

SEQ ID NO: 2592 - protein, 13 aa, Homo sapiens
  Heavy chain CDR3 for antibody 1296 (IGHV1-69)
ARDVAAGGTLFDD

SEQ ID NO: 2593 - protein, 8 aa, Homo sapiens
  Light chain CDR3 for antibody 1297 (IGKV3-20)
QQYGSSPT

SEQ ID NO: 2594 - protein, 24 aa, Homo sapiens
  Heavy chain CDR3 for antibody 1297 (IGHV1/OR21-1)
AATITMVREVIIPDYYHYYYGMDV

SEQ ID NO: 2595 - protein, 10 aa, Homo sapiens
  Light chain CDR3 for antibody 1298 (IGKV3-15)
QQYYNWPPLT

SEQ ID NO: 2596 - protein, 12 aa, Homo sapiens
  Heavy chain CDR3 for antibody 1298 (IGHV1-69)
ARWGDYYDSSDY

SEQ ID NO: 2597 - protein, 9 aa, Homo sapiens
  Light chain CDR3 for antibody 1299 (IGKV3-15)
QQFYDWPWT

SEQ ID NO: 2598 - protein, 10 aa, Homo sapiens
  Heavy chain CDR3 for antibody 1299 (IGHV2-5)
AYQRTADVDY

SEQ ID NO: 2599 - protein, 11 aa, Homo sapiens
  Light chain CDR3 for antibody 1300 (IGKV1-27)
QQYGSSPVMYT

SEQ ID NO: 2600 - protein, 12 aa, Homo sapiens
  Heavy chain CDR3 for antibody 1300 (IGHV3-33)
AKDRRGYSELDS

SEQ ID NO: 2601 - protein, 9 aa, Homo sapiens
  Light chain CDR3 for antibody 1301 (IGKV2D-28)
MQALQTSFT

SEQ ID NO: 2602 - protein, 24 aa, Homo sapiens
  Heavy chain CDR3 for antibody 1301 (IGHV1-46)
AGPITMVRGVIIPDYYYYYYGMDV

SEQ ID NO: 2603 - protein, 10 aa, Homo sapiens
  Light chain CDR3 for antibody 1302 (IGKV3-11)
QQRSNWPPYT

SEQ ID NO: 2604 - protein, 24 aa, Homo sapiens
  Heavy chain CDR3 for antibody 1302 (IGHV1-46)
AGPITMVRGVIIPDYYYYYYGMDV

SEQ ID NO: 2605 - protein, 8 aa, Homo sapiens
  Light chain CDR3 for antibody 1303 (IGKV3-20)
QQYGSSRS

SEQ ID NO: 2606 - protein, 6 aa, Homo sapiens
  Heavy chain CDR3 for antibody 1303 (IGHV1-46)
ARWGDY

SEQ ID NO: 2607 - protein, 10 aa, Homo sapiens
  Light chain CDR3 for antibody 1304 (IGKV1-39)
QQSYITPLYS

SEQ ID NO: 2608 - protein, 18 aa, Homo sapiens
  Heavy chain CDR3 for antibody 1304 (IGHV3-13)
ARGVSSSWGYYYYYYMDV

SEQ ID NO: 2609 - protein, 9 aa, Homo sapiens
  Light chain CDR3 for antibody 1305 (IGKV1-5)
QHYHTYPYT

SEQ ID NO: 2610 - protein, 16 aa, Homo sapiens
  Heavy chain CDR3 for antibody 1305 (IGHV1-46)
AREGANYYNSGSYADN

SEQ ID NO: 2611 - protein, 8 aa, Homo sapiens
  Light chain CDR3 for antibody 1306 (IGKV3-20)
QQYGSSPS

SEQ ID NO: 2612 - protein, 12 aa, Homo sapiens
  Heavy chain CDR3 for antibody 1306 (IGHV3-33)
AKDYPGNGYWVY

SEQ ID NO: 2613 - protein, 8 aa, Homo sapiens
  Light chain CDR3 for antibody 1307 (IGKV3-20)
QQYGSSPT

SEQ ID NO: 2614 - protein, 17 aa, Homo sapiens
  Heavy chain CDR3 for antibody 1307 (IGHV1-69)
ARLGYCDSISCFDGMDV

SEQ ID NO: 2615 - protein, 9 aa, Homo sapiens
  Light chain CDR3 for antibody 1308 (IGKV3-20)
QQYGSFLLT

SEQ ID NO: 2616 - protein, 22 aa, Homo sapiens
  Heavy chain CDR3 for antibody 1308 (IGHV1-69)
ARESSDTGIAVAGPSYYYYMDV

SEQ ID NO: 2617 - protein, 9 aa, Homo sapiens
  Light chain CDR3 for antibody 1309 (IGKV3-20)
QQYGSSPPT

SEQ ID NO: 2618 - protein, 22 aa, Homo sapiens
  Heavy chain CDR3 for antibody 1309 (IGHV3-66)
ARAHQKRIAAAGTNYYYYYMDV

SEQ ID NO: 2619 - protein, 8 aa, Homo sapiens
  Light chain CDR3 for antibody 1310 (IGKV3-20)
QQYGSSPT

SEQ ID NO: 2620 - protein, 24 aa, Homo sapiens
  Heavy chain CDR3 for antibody 1310 (IGHV1-46)
AVPITIIRGVIIPDYYYYYYGMDV

SEQ ID NO: 2621 - protein, 8 aa, Homo sapiens
  Light chain CDR3 for antibody 1311 (IGKV1-NL1)
QQYYSTRT

SEQ ID NO: 2622 - protein, 12 aa, Homo sapiens
  Heavy chain CDR3 for antibody 1311 (IGHV3-53)
ARDLGSVGATDY

SEQ ID NO: 2623 - protein, 9 aa, Homo sapiens
  Light chain CDR3 for antibody 1312 (IGKV1-5)
QQYDSSPFT

SEQ ID NO: 2624 - protein, 12 aa, Homo sapiens
  Heavy chain CDR3 for antibody 1312 (IGHV1-2)
SRWIAVAAPESD

SEQ ID NO: 2625 - protein, 10 aa, Homo sapiens
  Light chain CDR3 for antibody 1313 (IGKV3-20)
QQYGGSPPYT

SEQ ID NO: 2626 - protein, 21 aa, Homo sapiens
  Heavy chain CDR3 for antibody 1313 (IGHV1-8)
AGTNLPGTYYYDSIGYDTFDY

SEQ ID NO: 2627 - protein, 9 aa, Homo sapiens
  Light chain CDR3 for antibody 1314 (IGKV1-12)
QQANSFPYS

SEQ ID NO: 2628 - protein, 21 aa, Homo sapiens
  Heavy chain CDR3 for antibody 1314 (IGHV4/OR15-8)
ARDRGRYYDSSGYYWNDAFDI

SEQ ID NO: 2629 - protein, 8 aa, Homo sapiens
  Light chain CDR3 for antibody 1315 (IGKV3-20)
QQYGSSPT

SEQ ID NO: 2630 - protein, 24 aa, Homo sapiens
  Heavy chain CDR3 for antibody 1315 (IGHV1-58)
AGPITKVREVIIPDYYYYYYCIDV

SEQ ID NO: 2631 - protein, 9 aa, Homo sapiens
  Light chain CDR3 for antibody 1316 (IGKV6-21)
HQSSSLPYS

SEQ ID NO: 2632 - protein, 13 aa, Homo sapiens
  Heavy chain CDR3 for antibody 1316 (IGHV4-b)
ARSPRGDFYYFDY

SEQ ID NO: 2633 - protein, 9 aa, Homo sapiens
  Light chain CDR3 for antibody 1317 (IGKV2D-28)
MQALQTSFT

SEQ ID NO: 2634 - protein, 12 aa, Homo sapiens
  Heavy chain CDR3 for antibody 1317 (IGHV1-69)
ARWGDYYDSSDY

SEQ ID NO: 2635 - protein, 10 aa, Homo sapiens
  Light chain CDR3 for antibody 1318 (IGKV1-39)
QQSYSTPALT

SEQ ID NO: 2636 - protein, 16 aa, Homo sapiens
  Heavy chain CDR3 for antibody 1318 (IGHV5-51)
ARLQPPPYYYYYGMDV

SEQ ID NO: 2637 - protein, 9 aa, Homo sapiens
  Light chain CDR3 for antibody 1319 (IGKV1-39)
QQSYSTPPS

SEQ ID NO: 2638 - protein, 12 aa, Homo sapiens
  Heavy chain CDR3 for antibody 1319 (IGHV3-33)
AKDYPGNGYWVY

SEQ ID NO: 2639 - protein, 9 aa, Homo sapiens
  Light chain CDR3 for antibody 1320 (IGKV1-39)
QQSHSLPVT

SEQ ID NO: 2640 - protein, 15 aa, Homo sapiens
  Heavy chain CDR3 for antibody 1320 (IGHV1-69)
ARVPRITGTTQYFDY

SEQ ID NO: 2641 - protein, 9 aa, Homo sapiens
  Light chain CDR3 for antibody 1321 (IGKV1-27)
QKYNSALET

SEQ ID NO: 2642 - protein, 8 aa, Homo sapiens
  Heavy chain CDR3 for antibody 1321 (IGHV3-53)
VTSPGAGN

SEQ ID NO: 2643 - protein, 8 aa, Homo sapiens
  Light chain CDR3 for antibody 1322 (IGKV3-20)
QQYGSSPT

SEQ ID NO: 2644 - protein, 24 aa, Homo sapiens
  Heavy chain CDR3 for antibody 1322 (IGHV1-46)
AGPIAMVRGVIIPGYYCYYYGMDV

SEQ ID NO: 2645 - protein, 8 aa, Homo sapiens
  Light chain CDR3 for antibody 1323 (IGKV3-20)
QQYGSSPT

SEQ ID NO: 2646 - protein, 24 aa, Homo sapiens
  Heavy chain CDR3 for antibody 1323 (IGHV1-46)
AGPIAMVGGVIMPDYYYYYYGMDV

SEQ ID NO: 2647 - protein, 11 aa, Homo sapiens
  Light chain CDR3 for antibody 1324 (IGKV1-39)
QQSYSNPPEDS

SEQ ID NO: 2648 - protein, 16 aa, Homo sapiens
  Heavy chain CDR3 for antibody 1324 (IGHV3-13)
ARGRTPAASFYYYMDV

SEQ ID NO: 2649 - protein, 8 aa, Homo sapiens
  Light chain CDR3 for antibody 1325 (IGKV3-20)
QQYGSSRS

SEQ ID NO: 2650 - protein, 9 aa, Homo sapiens
  Heavy chain CDR3 for antibody 1325 (IGHV4/OR15-8)
ARVLGAMYT

SEQ ID NO: 2651 - protein, 9 aa, Homo sapiens
  Light chain CDR3 for antibody 1326 (IGKV1-39)
QQSYNTPRT

SEQ ID NO: 2652 - protein, 19 aa, Homo sapiens
  Heavy chain CDR3 for antibody 1326 (IGHV4-34)
ARAKDSSDLNTYHYYAMDV

SEQ ID NO: 2653 - protein, 8 aa, Homo sapiens
  Light chain CDR3 for antibody 1327 (IGKV1-33)
QQYDTPST

SEQ ID NO: 2654 - protein, 8 aa, Homo sapiens
  Heavy chain CDR3 for antibody 1327 (IGHV3-30)
AKDGDKAT

SEQ ID NO: 2655 - protein, 8 aa, Homo sapiens
  Light chain CDR3 for antibody 1328 (IGKV3-20)
QQYGSSPT

SEQ ID NO: 2656 - protein, 24 aa, Homo sapiens
  Heavy chain CDR3 for antibody 1328 (IGHV1-69)
AGTITMVRGVIIPDYCYYYYGMDV

SEQ ID NO: 2657 - protein, 8 aa, Homo sapiens
  Light chain CDR3 for antibody 1329 (IGKV3-20)
QQYGSSPT

SEQ ID NO: 2658 - protein, 24 aa, Homo sapiens
  Heavy chain CDR3 for antibody 1329 (IGHVPD1-5)
PTPITMVREVIIPYYYYYYYGMHV

SEQ ID NO: 2659 - protein, 11 aa, Homo sapiens
  Light chain CDR3 for antibody 1330 (IGKV1-39)
QQSYSNPPEDS

SEQ ID NO: 2660 - protein, 21 aa, Homo sapiens
  Heavy chain CDR3 for antibody 1330 (IGHV4/OR15-8)
ARDRGRYYDSSGYEEMYAFDI

SEQ ID NO: 2661 - protein, 9 aa, Homo sapiens
  Light chain CDR3 for antibody 1331 (IGKV1-12)
QQANSFPYS

SEQ ID NO: 2662 - protein, 18 aa, Homo sapiens
  Heavy chain CDR3 for antibody 1331 (IGHV3-33)
AKDGAAMARGYYYYGMDV

SEQ ID NO: 2663 - protein, 9 aa, Homo sapiens
  Light chain CDR3 for antibody 1332 (IGKV6-21)
HQSSSLPYS

SEQ ID NO: 2664 - protein, 11 aa, Homo sapiens
  Heavy chain CDR3 for antibody 1332 (IGHV3-53)
ARDLQVYGMDV

SEQ ID NO: 2665 - protein, 11 aa, Homo sapiens
  Light chain CDR3 for antibody 1333 (IGKV1-39)
QQSYSNPPEDS

SEQ ID NO: 2666 - protein, 9 aa, Homo sapiens
  Heavy chain CDR3 for antibody 1333 (IGHV4/OR15-8)
ARVLGAMFT

SEQ ID NO: 2667 - protein, 9 aa, Homo sapiens
  Light chain CDR3 for antibody 1334 (IGKV3-20)
QQYGSSPFT

SEQ ID NO: 2668 - protein, 21 aa, Homo sapiens
  Heavy chain CDR3 for antibody 1334 (IGHV5-51)
ARQLYCATTTSCSSIWGYFHY

SEQ ID NO: 2669 - protein, 9 aa, Homo sapiens
  Light chain CDR3 for antibody 1335 (IGKV1-12)
QQANSFPYS

SEQ ID NO: 2670 - protein, 13 aa, Homo sapiens
  Heavy chain CDR3 for antibody 1335 (IGHV1-18)
AREDGDYVVSFDY

SEQ ID NO: 2671 - protein, 7 aa, Homo sapiens
  Light chain CDR3 for antibody 1336 (IGKV3-20)
QQYGSSL

SEQ ID NO: 2672 - protein, 11 aa, Homo sapiens
  Heavy chain CDR3 for antibody 1336 (IGHV3-53)
ARGHWEYYFDY

SEQ ID NO: 2673 - protein, 9 aa, Homo sapiens
  Light chain CDR3 for antibody 1337 (IGKV3-20)
QQYGSSLWT

SEQ ID NO: 2674 - protein, 16 aa, Homo sapiens
  Heavy chain CDR3 for antibody 1337 (IGHV1-58)
AAPYCSGGSCFDAFDI

SEQ ID NO: 2675 - protein, 9 aa, Homo sapiens
  Light chain CDR3 for antibody 1338 (IGKV1-33)
QQYDNLPRT

SEQ ID NO: 2676 - protein, 13 aa, Homo sapiens
  Heavy chain CDR3 for antibody 1338 (IGHV3-53)
ARDGYCRGGSCYH

SEQ ID NO: 2677 - protein, 9 aa, Homo sapiens
  Light chain CDR3 for antibody 1339 (IGKV1-33)
QQYDNLPQT

SEQ ID NO: 2678 - protein, 12 aa, Homo sapiens
  Heavy chain CDR3 for antibody 1339 (IGHV3-53)
ARPTLSRGGMDV

SEQ ID NO: 2679 - protein, 8 aa, Homo sapiens
  Light chain CDR3 for antibody 1340 (IGKV1-12)
QQANSFPL

SEQ ID NO: 2680 - protein, 11 aa, Homo sapiens
  Heavy chain CDR3 for antibody 1340 (IGHV3-53)
ARDRYSYGLDY

SEQ ID NO: 2681 - protein, 9 aa, Homo sapiens
  Light chain CDR3 for antibody 1341 (IGKV1-5)
QQYNSYSRT

SEQ ID NO: 2682 - protein, 13 aa, Homo sapiens
  Heavy chain CDR3 for antibody 1341 (IGHV5-51)
ARQLCGGDCAFDY

SEQ ID NO: 2683 - protein, 9 aa, Homo sapiens
  Light chain CDR3 for antibody 1342 (IGKV1-9)
QQLNSDPPP

SEQ ID NO: 2684 - protein, 11 aa, Homo sapiens
  Heavy chain CDR3 for antibody 1342 (IGHV3-53)
ARDRVVYGMDV

SEQ ID NO: 2685 - protein, 8 aa, Homo sapiens
  Light chain CDR3 for antibody 1343 (IGKV3-15)
QQYNNWGT

SEQ ID NO: 2686 - protein, 15 aa, Homo sapiens
  Heavy chain CDR3 for antibody 1343 (IGHV1-69)
ARGQGPYSYYYYMDV

SEQ ID NO: 2687 - protein, 9 aa, Homo sapiens
  Light chain CDR3 for antibody 1344 (IGKV1-27)
QKYNSVSDT

SEQ ID NO: 2688 - protein, 11 aa, Homo sapiens
  Heavy chain CDR3 for antibody 1344 (IGHV3-53)
ARDRGSGWYDY

SEQ ID NO: 2689 - protein, 9 aa, Homo sapiens
  Light chain CDR3 for antibody 1345 (IGKV1-5)
QHYNIYPYT

SEQ ID NO: 2690 - protein, 13 aa, Homo sapiens
  Heavy chain CDR3 for antibody 1345 (IGHV3-23)
AKDSRGSTDYFDY

SEQ ID NO: 2691 - protein, 8 aa, Homo sapiens
  Light chain CDR3 for antibody 1346 (IGKV1-5)
QQYNSYSA

SEQ ID NO: 2692 - protein, 17 aa, Homo sapiens
  Heavy chain CDR3 for antibody 1346 (IGHV1-69)
ARGPPLPSSGWSEIWVY

SEQ ID NO: 2693 - protein, 10 aa, Homo sapiens
  Light chain CDR3 for antibody 1347 (IGKV1-39)
QQSYSTPPWT

SEQ ID NO: 2694 - protein, 16 aa, Homo sapiens
  Heavy chain CDR3 for antibody 1347 (IGHV3-64)
ARDSGDSPALVTWFDY

SEQ ID NO: 2695 - protein, 9 aa, Homo sapiens
  Light chain CDR3 for antibody 1348 (IGKV1-5)
QQYNSYPWT

SEQ ID NO: 2696 - protein, 19 aa, Homo sapiens
  Heavy chain CDR3 for antibody 1348 (IGHV1-3)
ATGLGKHDYSNYVVDYMDV

SEQ ID NO: 2697 - protein, 10 aa, Homo sapiens
  Light chain CDR3 for antibody 1349 (IGKV1-39)
QQSYSTPPIT

SEQ ID NO: 2698 - protein, 11 aa, Homo sapiens
  Heavy chain CDR3 for antibody 1349 (IGHV3-21)
AREVSVTDFDY

SEQ ID NO: 2699 - protein, 9 aa, Homo sapiens
  Light chain CDR3 for antibody 1350 (IGKV3-20)
QQYGSSPRT

SEQ ID NO: 2700 - protein, 11 aa, Homo sapiens
  Heavy chain CDR3 for antibody 1350 (IGHV3-53)
ARDYGDFYFDY

SEQ ID NO: 2701 - protein, 10 aa, Homo sapiens
  Light chain CDR3 for antibody 1351 (IGKV3-11)
QQRSNWPAGT

SEQ ID NO: 2702 - protein, 9 aa, Homo sapiens
  Heavy chain CDR3 for antibody 1351 (IGHV3-53)
ARDAPENGD

SEQ ID NO: 2703 - protein, 9 aa, Homo sapiens
  Light chain CDR3 for antibody 1352 (IGKV1-9)
QQLNSYPLT

SEQ ID NO: 2704 - protein, 11 aa, Homo sapiens
  Heavy chain CDR3 for antibody 1352 (IGHV3-53)
ARDIVVYGMDV

SEQ ID NO: 2705 - protein, 9 aa, Homo sapiens
  Light chain CDR3 for antibody 1353 (IGKV1-5)
QQYNSYPYT

SEQ ID NO: 2706 - protein, 14 aa, Homo sapiens
  Heavy chain CDR3 for antibody 1353 (IGHV4-39)
ASGDYGDYHRGFDY

SEQ ID NO: 2707 - protein, 9 aa, Homo sapiens
  Light chain CDR3 for antibody 1354 (IGKV1-33)
QQYDNLPIT

SEQ ID NO: 2708 - protein, 14 aa, Homo sapiens
  Heavy chain CDR3 for antibody 1354 (IGHV3-53)
ARLFYGGNSAGVDY

SEQ ID NO: 2709 - protein, 7 aa, Homo sapiens
  Light chain CDR3 for antibody 1355 (IGKV1-9)
QQLNSYS

SEQ ID NO: 2710 - protein, 11 aa, Homo sapiens
  Heavy chain CDR3 for antibody 1355 (IGHV3-53)
ARDLAVYGMDV

SEQ ID NO: 2711 - protein, 9 aa, Homo sapiens
  Light chain CDR3 for antibody 1356 (IGKV1-39)
QQSYSTPLT

SEQ ID NO: 2712 - protein, 20 aa, Homo sapiens
  Heavy chain CDR3 for antibody 1356 (IGHV3-30)
AKEEGKRWLQIYYYYYGMDV

SEQ ID NO: 2713 - protein, 10 aa, Homo sapiens
  Light chain CDR3 for antibody 1357 (IGKV1-39)
QQSYSNGSGT

SEQ ID NO: 2714 - protein, 12 aa, Homo sapiens
  Heavy chain CDR3 for antibody 1357 (IGHV3-53)
ARDLFEAGGMDV

SEQ ID NO: 2715 - protein, 9 aa, Homo sapiens
  Light chain CDR3 for antibody 1358 (IGKV1-39)
QQNLVIPRA

SEQ ID NO: 2716 - protein, 12 aa, Homo sapiens
  Heavy chain CDR3 for antibody 1358 (IGHV3-15)
TTDSRTLYALDV

SEQ ID NO: 2717 - protein, 8 aa, Homo sapiens
  Light chain CDR3 for antibody 1359 (IGKV1-5)
QQYNTLYT

SEQ ID NO: 2718 - protein, 11 aa, Homo sapiens
  Heavy chain CDR3 for antibody 1359 (IGHV5-51)
ARSPTTNTFDY

SEQ ID NO: 2719 - protein, 9 aa, Homo sapiens
  Light chain CDR3 for antibody 1360 (IGKV1-12)
QQANSFPPT

SEQ ID NO: 2720 - protein, 21 aa, Homo sapiens
  Heavy chain CDR3 for antibody 1360 (IGHV2-5)
AQRLGYCSSTSCYNRFVAFDI

SEQ ID NO: 2721 - protein, 10 aa, Homo sapiens
  Light chain CDR3 for antibody 1361 (IGKV1-9)
QQLNSYPPVT

SEQ ID NO: 2722 - protein, 11 aa, Homo sapiens
  Heavy chain CDR3 for antibody 1361 (IGHV3-53)
ARDLDYYGMDV

SEQ ID NO: 2723 - protein, 8 aa, Homo sapiens
  Light chain CDR3 for antibody 1362 (IGKV4-1)
QQYYSTPS

SEQ ID NO: 2724 - protein, 19 aa, Homo sapiens
  Heavy chain CDR3 for antibody 1362 (IGHV1-69)
AEGRALTLSYSSSYGAFDY

SEQ ID NO: 2725 - protein, 10 aa, Homo sapiens
  Light chain CDR3 for antibody 1363 (IGKV3-20)
QQYGSSPPWT

SEQ ID NO: 2726 - protein, 14 aa, Homo sapiens
  Heavy chain CDR3 for antibody 1363 (IGHV1-69)
ARYGVSYGDYLPDY

SEQ ID NO: 2727 - protein, 6 aa, Homo sapiens
  Light chain CDR3 for antibody 1364 (IGKV1-5)
QQYNSY

SEQ ID NO: 2728 - protein, 19 aa, Homo sapiens
  Heavy chain CDR3 for antibody 1364 (IGHV1-69)
ARGVRYCSGGSCYGAHFQH

SEQ ID NO: 2729 - protein, 9 aa, Homo sapiens
  Light chain CDR3 for antibody 1365 (IGKV1-5)
QQYNSYPWT

SEQ ID NO: 2730 - protein, 13 aa, Homo sapiens
  Heavy chain CDR3 for antibody 1365 (IGHV1-3)
ARGAVTNYDYFDY

SEQ ID NO: 2731 - protein, 9 aa, Homo sapiens
  Light chain CDR3 for antibody 1366 (IGKV1-9)
QQLNSYPPI

SEQ ID NO: 2732 - protein, 11 aa, Homo sapiens
  Heavy chain CDR3 for antibody 1366 (IGHV3-53)
ARDLGSSGSDY

SEQ ID NO: 2733 - protein, 7 aa, Homo sapiens
  Light chain CDR3 for antibody 1367 (IGKV3-20)
QQYGSSL

SEQ ID NO: 2734 - protein, 16 aa, Homo sapiens
  Heavy chain CDR3 for antibody 1367 (IGHV1-58)
AAPYCSGGSCFDAFDI

SEQ ID NO: 2735 - protein, 9 aa, Homo sapiens
  Light chain CDR3 for antibody 1368 (IGKV1-33)
QQYDNLPPT

SEQ ID NO: 2736 - protein, 20 aa, Homo sapiens
  Heavy chain CDR3 for antibody 1368 (IGHV3-NL1)
AKQVGEYCSGGSCYSYYFDY

SEQ ID NO: 2737 - protein, 9 aa, Homo sapiens
  Light chain CDR3 for antibody 1369 (IGKV3-20)
QQYGSSLWT

SEQ ID NO: 2738 - protein, 11 aa, Homo sapiens
  Heavy chain CDR3 for antibody 1369 (IGHV3-53)
ARGHWEYYFDY

SEQ ID NO: 2739 - protein, 8 aa, Homo sapiens
  Light chain CDR3 for antibody 1370 (IGKV1-39)
QQSYSMYT

SEQ ID NO: 2740 - protein, 12 aa, Homo sapiens
  Heavy chain CDR3 for antibody 1370 (IGHV3-53)
ARAPLGTDYFDS

SEQ ID NO: 2741 - protein, 10 aa, Homo sapiens
  Light chain CDR3 for antibody 1371 (IGKV1-9)
QQLNSYPGYT

SEQ ID NO: 2742 - protein, 11 aa, Homo sapiens
  Heavy chain CDR3 for antibody 1371 (IGHV3-53)
ARDRGGDVFDI

SEQ ID NO: 2743 - protein, 10 aa, Homo sapiens
  Light chain CDR3 for antibody 1372 (IGKV1-33)
QQYDNLPQYN

SEQ ID NO: 2744 - protein, 12 aa, Homo sapiens
  Heavy chain CDR3 for antibody 1372 (IGHV3-53)
AREIPSGSYWDY

SEQ ID NO: 2745 - protein, 10 aa, Homo sapiens
  Light chain CDR3 for antibody 1373 (IGKV1-39)
QQSYNTRALT

SEQ ID NO: 2746 - protein, 18 aa, Homo sapiens
  Heavy chain CDR3 for antibody 1373 (IGHV3-15)
TTDRGFRYQLLEHDAFDI

SEQ ID NO: 2747 - protein, 9 aa, Homo sapiens
  Light chain CDR3 for antibody 1374 (IGKV1-5)
QQYKSYSQT

SEQ ID NO: 2748 - protein, 16 aa, Homo sapiens
  Heavy chain CDR3 for antibody 1374 (IGHV3-30)
AKPLFTYSYGQNYFDY

SEQ ID NO: 2749 - protein, 10 aa, Homo sapiens
  Light chain CDR3 for antibody 1375 (IGKV1-39)
QQSYVTPGLT

SEQ ID NO: 2750 - protein, 13 aa, Homo sapiens
  Heavy chain CDR3 for antibody 1375 (IGHV3-64)
ARDADRAVPIFDY

SEQ ID NO: 2751 - protein, 9 aa, Homo sapiens
  Light chain CDR3 for antibody 1376 (IGKV1-39)
QQSYSTPQT

SEQ ID NO: 2752 - protein, 14 aa, Homo sapiens
  Heavy chain CDR3 for antibody 1376 (IGHV1-69)
AREVEMATLYGMDV

SEQ ID NO: 2753 - protein, 9 aa, Homo sapiens
  Light chain CDR3 for antibody 1377 (IGKV1-5)
QQYNSYPVT

SEQ ID NO: 2754 - protein, 21 aa, Homo sapiens
  Heavy chain CDR3 for antibody 1377 (IGHV4-b)
ARDGLTGGIVVVPAAQYYFDY

SEQ ID NO: 2755 - protein, 8 aa, Homo sapiens
  Light chain CDR3 for antibody 1378 (IGKV1-12)
QQANSFPL

SEQ ID NO: 2756 - protein, 11 aa, Homo sapiens
  Heavy chain CDR3 for antibody 1378 (IGHV3-53)
ARGHWEYYFDY

SEQ ID NO: 2757 - protein, 7 aa, Homo sapiens
  Light chain CDR3 for antibody 1379 (IGKV3-20)
QQYGSSL

SEQ ID NO: 2758 - protein, 11 aa, Homo sapiens
  Heavy chain CDR3 for antibody 1379 (IGHV3-53)
ARDRYSYGLDY

SEQ ID NO: 2759 - protein, 9 aa, Homo sapiens
  Light chain CDR3 for antibody 1380 (IGKV1-9)
QQLNSDPPP

SEQ ID NO: 2760 - protein, 11 aa, Homo sapiens
  Heavy chain CDR3 for antibody 1380 (IGHV3-53)
ARGHWEYYFDY

SEQ ID NO: 2761 - protein, 8 aa, Homo sapiens
  Light chain CDR3 for antibody 1381 (IGKV1-39)
QQSYSTPS

SEQ ID NO: 2762 - protein, 14 aa, Homo sapiens
  Heavy chain CDR3 for antibody 1381 (IGHV1-69)
AREVEMATLYGMDV

SEQ ID NO: 2763 - protein, 9 aa, Homo sapiens
  Light chain CDR3 for antibody 1382 (IGKV1-39)
QQSYSTPYT

SEQ ID NO: 2764 - protein, 12 aa, Homo sapiens
  Heavy chain CDR3 for antibody 1382 (IGHV3-53)
ARDLFEAGGMDV

SEQ ID NO: 2765 - protein, 12 aa, Homo sapiens
  Light chain CDR3 for antibody 1383 (IGKV1-9)
QQLNSYPQNGLT

SEQ ID NO: 2766 - protein, 11 aa, Homo sapiens
  Heavy chain CDR3 for antibody 1383 (IGHV3-53)
ARAYGDYYFDY

SEQ ID NO: 2767 - protein, 8 aa, Homo sapiens
  Light chain CDR3 for antibody 1384 (IGKV1-9)
QQLNSYPF

SEQ ID NO: 2768 - protein, 11 aa, Homo sapiens
  Heavy chain CDR3 for antibody 1384 (IGHV3-53)
ARDLDYYGMDV

SEQ ID NO: 2769 - protein, 9 aa, Homo sapiens
  Light chain CDR3 for antibody 1385 (IGKV1-5)
QHYNIYPYT

SEQ ID NO: 2770 - protein, 11 aa, Homo sapiens
  Heavy chain CDR3 for antibody 1385 (IGHV3-53)
ARGHWEYYFDY

SEQ ID NO: 2771 - protein, 9 aa, Homo sapiens
  Light chain CDR3 for antibody 1386 (IGKV2D-28)
MQALQTPHT

SEQ ID NO: 2772 - protein, 18 aa, Homo sapiens
  Heavy chain CDR3 for antibody 1386 (IGHV1-18)
ARDLVGYCSGGSCHSGDY

SEQ ID NO: 2773 - protein, 10 aa, Homo sapiens
  Light chain CDR3 for antibody 1387 (IGKV1-9)
QQLNSYPGGR

SEQ ID NO: 2774 - protein, 9 aa, Homo sapiens
  Heavy chain CDR3 for antibody 1387 (IGHV3-53)
AREGYGMDV

SEQ ID NO: 2775 - protein, 9 aa, Homo sapiens
  Light chain CDR3 for antibody 1388 (IGKV1-27)
QKYNSVSDT

SEQ ID NO: 2776 - protein, 11 aa, Homo sapiens
  Heavy chain CDR3 for antibody 1388 (IGHV3-53)
ARGHWEYYFDY

SEQ ID NO: 2777 - protein, 8 aa, Homo sapiens
  Light chain CDR3 for antibody 1389 (IGKV1-39)
QQTYSTPG

SEQ ID NO: 2778 - protein, 17 aa, Homo sapiens
  Heavy chain CDR3 for antibody 1389 (IGHV3-9)
AKDHRYDYSNYGCYFDY

SEQ ID NO: 2779 - protein, 10 aa, Homo sapiens
  Light chain CDR3 for antibody 1390 (IGKV1-39)
QQSYSTPGLT

SEQ ID NO: 2780 - protein, 15 aa, Homo sapiens
  Heavy chain CDR3 for antibody 1390 (IGHV3-13)
ARDRGGYYTGYAFDI

SEQ ID NO: 2781 - protein, 7 aa, Homo sapiens
  Light chain CDR3 for antibody 1391 (IGKV3-20)
QQYGSSL

SEQ ID NO: 2782 - protein, 12 aa, Homo sapiens
  Heavy chain CDR3 for antibody 1391 (IGHV3-53)
ARPTLSRGGMDV

SEQ ID NO: 2783 - protein, 7 aa, Homo sapiens
  Light chain CDR3 for antibody 1392 (IGKV3-20)
QQYGSSL

SEQ ID NO: 2784 - protein, 13 aa, Homo sapiens
  Heavy chain CDR3 for antibody 1392 (IGHV3-53)
ARDGYCRGGSCYH

SEQ ID NO: 2785 - protein, 9 aa, Homo sapiens
  Light chain CDR3 for antibody 1393 (IGKV1-33)
QQYDNLPGT

SEQ ID NO: 2786 - protein, 12 aa, Homo sapiens
  Heavy chain CDR3 for antibody 1393 (IGHV3-53)
ARDLFEAGGMDV

SEQ ID NO: 2787 - protein, 9 aa, Homo sapiens
  Light chain CDR3 for antibody 1394 (IGKV1-33)
QQYDNLPGT

SEQ ID NO: 2788 - protein, 17 aa, Homo sapiens
  Heavy chain CDR3 for antibody 1394 (IGHV5-51)
ARRQGRWYRGMFHYMDV

SEQ ID NO: 2789 - protein, 10 aa, Homo sapiens
  Light chain CDR3 for antibody 1395 (IGKV3-20)
QQYGSSPMYT

SEQ ID NO: 2790 - protein, 12 aa, Homo sapiens
  Heavy chain CDR3 for antibody 1395 (IGHV4-34)
ARGLWSLWYFDL

SEQ ID NO: 2791 - protein, 9 aa, Homo sapiens
  Light chain CDR3 for antibody 1396 (IGKV2D-28)
MQALQTPCT

SEQ ID NO: 2792 - protein, 20 aa, Homo sapiens
  Heavy chain CDR3 for antibody 1396 (IGHV1-69)
ARVGAPPYGLRDYYYYGMDV

SEQ ID NO: 2793 - protein, 7 aa, Homo sapiens
  Light chain CDR3 for antibody 1397 (IGKV3-20)
QQYGSSL

SEQ ID NO: 2794 - protein, 11 aa, Homo sapiens
  Heavy chain CDR3 for antibody 1397 (IGHV3-53)
ARDYGDFYFDY

SEQ ID NO: 2795 - protein, 7 aa, Homo sapiens
  Light chain CDR3 for antibody 1398 (IGKV3-20)
QQYGSSL

SEQ ID NO: 2796 - protein, 11 aa, Homo sapiens
  Heavy chain CDR3 for antibody 1398 (IGHV3-53)
ARDRGSGWYDY

SEQ ID NO: 2797 - protein, 9 aa, Homo sapiens
  Light chain CDR3 for antibody 1399 (IGKV1-12)
QQANSFPWT

SEQ ID NO: 2798 - protein, 25 aa, Homo sapiens
  Heavy chain CDR3 for antibody 1399 (IGHV3-11)
ARDTLRATGYCSGGSCYDTKRWFDP

SEQ ID NO: 2799 - protein, 10 aa, Homo sapiens
  Light chain CDR3 for antibody 1400 (IGKV1-39)
QQSYSTPLIT

SEQ ID NO: 2800 - protein, 17 aa, Homo sapiens
  Heavy chain CDR3 for antibody 1400 (IGHV1-69)
ARGLRTVVVTARYGMDV

SEQ ID NO: 2801 - protein, 10 aa, Homo sapiens
  Light chain CDR3 for antibody 1401 (IGKV1-33)
QQYDDLPPYT

SEQ ID NO: 2802 - protein, 18 aa, Homo sapiens
  Heavy chain CDR3 for antibody 1401 (IGHV2-26)
AHRMTTATCSGACGAFDM

SEQ ID NO: 2803 - protein, 9 aa, Homo sapiens
  Light chain CDR3 for antibody 1402 (IGKV1-39)
QQSYSTPLT

SEQ ID NO: 2804 - protein, 11 aa, Homo sapiens
  Heavy chain CDR3 for antibody 1402 (IGHV3-53)
ARGHWEYYFDY

SEQ ID NO: 2805 - protein, 8 aa, Homo sapiens
  Light chain CDR3 for antibody 1403 (IGKV1-39)
QQSYSTPS

SEQ ID NO: 2806 - protein, 12 aa, Homo sapiens
  Heavy chain CDR3 for antibody 1403 (IGHV1/OR15-9)
ARVEVGATFVDY

SEQ ID NO: 2807 - protein, 9 aa, Homo sapiens
  Light chain CDR3 for antibody 1404 (IGKV1-39)
QQSYSAPLT

SEQ ID NO: 2808 - protein, 14 aa, Homo sapiens
  Heavy chain CDR3 for antibody 1404 (IGHV4-59)
TRGHQETPYNWFDP

SEQ ID NO: 2809 - protein, 9 aa, Homo sapiens
  Light chain CDR3 for antibody 1405 (IGKV1-5)
QQYNSYPWT

SEQ ID NO: 2810 - protein, 14 aa, Homo sapiens
  Heavy chain CDR3 for antibody 1405 (IGHV1-3)
ARGLAAGTSDAFDI

SEQ ID NO: 2811 - protein, 9 aa, Homo sapiens
  Light chain CDR3 for antibody 1406 (IGKV1-9)
QQLNSYPLT

SEQ ID NO: 2812 - protein, 11 aa, Homo sapiens
  Heavy chain CDR3 for antibody 1406 (IGHV3-53)
ARGHWEYYFDY

SEQ ID NO: 2813 - protein, 10 aa, Homo sapiens
  Light chain CDR3 for antibody 1407 (IGKV1-9)
QQLNSYPGYT

SEQ ID NO: 2814 - protein, 11 aa, Homo sapiens
  Heavy chain CDR3 for antibody 1407 (IGHV3-53)
ARGHWEYYFDY

SEQ ID NO: 2815 - protein, 7 aa, Homo sapiens
  Light chain CDR3 for antibody 1408 (IGKV3-20)
QQYGSSL

SEQ ID NO: 2816 - protein, 9 aa, Homo sapiens
  Heavy chain CDR3 for antibody 1408 (IGHV3-53)
ARDAPENGD

SEQ ID NO: 2817 - protein, 10 aa, Homo sapiens
  Light chain CDR3 for antibody 1409 (IGKV3-11)
QQRSNWPAGT

SEQ ID NO: 2818 - protein, 11 aa, Homo sapiens
  Heavy chain CDR3 for antibody 1409 (IGHV3-53)
ARGHWEYYFDY

SEQ ID NO: 2819 - protein, 7 aa, Homo sapiens
  Light chain CDR3 for antibody 1410 (IGKV3-20)
QQYGSSL

SEQ ID NO: 2820 - protein, 13 aa, Homo sapiens
  Heavy chain CDR3 for antibody 1410 (IGHV3-23)
AKDSRGSTDYFDY

SEQ ID NO: 2821 - protein, 9 aa, Homo sapiens
  Light chain CDR3 for antibody 1411 (IGKV1-33)
QQYDNLPQT

SEQ ID NO: 2822 - protein, 16 aa, Homo sapiens
  Heavy chain CDR3 for antibody 1411 (IGHV1-58)
AAPYCSGGSCFDAFDI

SEQ ID NO: 2823 - protein, 11 aa, Homo sapiens
  Light chain CDR3 for antibody 1412 (IGKV1-13)
QHFNGYPRSIP

SEQ ID NO: 2824 - protein, 11 aa, Homo sapiens
  Heavy chain CDR3 for antibody 1412 (IGHV4-31)
AGRSLVDNAFS

SEQ ID NO: 2825 - protein, 10 aa, Homo sapiens
  Light chain CDR3 for antibody 1413 (IGKV1-9)
QQLNSYPGFT

SEQ ID NO: 2826 - protein, 11 aa, Homo sapiens
  Heavy chain CDR3 for antibody 1413 (IGHV3-53)
ARDQGNDAFDI

SEQ ID NO: 2827 - protein, 10 aa, Homo sapiens
  Light chain CDR3 for antibody 1414 (IGKV1-39)
QQSYSNGSGT

SEQ ID NO: 2828 - protein, 11 aa, Homo sapiens
  Heavy chain CDR3 for antibody 1414 (IGHV3-53)
ARGHWEYYFDY

SEQ ID NO: 2829 - protein, 9 aa, Homo sapiens
  Light chain CDR3 for antibody 1415 (IGKV1-33)
QQYDNLPLT

SEQ ID NO: 2830 - protein, 15 aa, Homo sapiens
  Heavy chain CDR3 for antibody 1415 (IGHV4/OR15-8)
ARGEGGQLWFYAFDI

SEQ ID NO: 2831 - protein, 9 aa, Homo sapiens
  Light chain CDR3 for antibody 1416 (IGKV1-39)
QQGYNTPRT

SEQ ID NO: 2832 - protein, 13 aa, Homo sapiens
  Heavy chain CDR3 for antibody 1416 (IGHV1-2)
ARGRGAARLGMDV

SEQ ID NO: 2833 - protein, 7 aa, Homo sapiens
  Light chain CDR3 for antibody 1417 (IGKV3-20)
QQYGSSL

SEQ ID NO: 2834 - protein, 12 aa, Homo sapiens
  Heavy chain CDR3 for antibody 1417 (IGHV3-53)
ARDLFEAGGMDV

SEQ ID NO: 2835 - protein, 9 aa, Homo sapiens
  Light chain CDR3 for antibody 1418 (IGKV1-5)
QQYNSYPWT

SEQ ID NO: 2836 - protein, 12 aa, Homo sapiens
  Heavy chain CDR3 for antibody 1418 (IGHV1-69)
ARGPVVLGAFDI

SEQ ID NO: 2837 - protein, 7 aa, Homo sapiens
  Light chain CDR3 for antibody 1419 (IGKV1-9)
QQLNSYS

SEQ ID NO: 2838 - protein, 11 aa, Homo sapiens
  Heavy chain CDR3 for antibody 1419 (IGHV3-53)
ARGHWEYYFDY

SEQ ID NO: 2839 - protein, 10 aa, Homo sapiens
  Light chain CDR3 for antibody 1420 (IGKV1-39)
QQSYSTPPWT

SEQ ID NO: 2840 - protein, 16 aa, Homo sapiens
  Heavy chain CDR3 for antibody 1420 (IGHV1-58)
AAPYCSGGSCFDAFDI

SEQ ID NO: 2841 - protein, 8 aa, Homo sapiens
  Light chain CDR3 for antibody 1421 (IGKV2-30)
MQASHWPS

SEQ ID NO: 2842 - protein, 11 aa, Homo sapiens
  Heavy chain CDR3 for antibody 1421 (IGHV3-48)
ARDDGFRSVDF

SEQ ID NO: 2843 - protein, 7 aa, Homo sapiens
  Light chain CDR3 for antibody 1422 (IGKV3-20)
QQYGSSL

SEQ ID NO: 2844 - protein, 15 aa, Homo sapiens
  Heavy chain CDR3 for antibody 1422 (IGHV1-69)
ARGQGPYSYYYYMDV

SEQ ID NO: 2845 - protein, 9 aa, Homo sapiens
  Light chain CDR3 for antibody 1423 (IGKV6-21)
HQSSSLPWT

SEQ ID NO: 2846 - protein, 14 aa, Homo sapiens
  Heavy chain CDR3 for antibody 1423 (IGHV4-31)
AREVGSGYSWYFDL

SEQ ID NO: 2847 - protein, 7 aa, Homo sapiens
  Light chain CDR3 for antibody 1424 (IGKV3-20)
QQYGSSL

SEQ ID NO: 2848 - protein, 16 aa, Homo sapiens
  Heavy chain CDR3 for antibody 1424 (IGHV3-64)
ARDSGDSPALVTWFDY

SEQ ID NO: 2849 - protein, 9 aa, Homo sapiens
  Light chain CDR3 for antibody 1425 (IGKV1-39)
QQSYSTPRT

SEQ ID NO: 2850 - protein, 17 aa, Homo sapiens
  Heavy chain CDR3 for antibody 1425 (IGHV4-34)
ARASSETYGGYSDAFDI

SEQ ID NO: 2851 - protein, 8 aa, Homo sapiens
  Light chain CDR3 for antibody 1426 (IGKV3-15)
QQYNNWGT

SEQ ID NO: 2852 - protein, 16 aa, Homo sapiens
  Heavy chain CDR3 for antibody 1426 (IGHV1-58)
AAPYCSGGSCFDAFDI

SEQ ID NO: 2853 - protein, 9 aa, Homo sapiens
  Light chain CDR3 for antibody 1427 (IGKV1-12)
QQAKTFPCT

SEQ ID NO: 2854 - protein, 15 aa, Homo sapiens
  Heavy chain CDR3 for antibody 1427 (IGHV4/OR15-8)
ARGEGGQLWFYAFDI

SEQ ID NO: 2855 - protein, 8 aa, Homo sapiens
  Light chain CDR3 for antibody 1428 (IGKV1-12)
QQANSFPL

SEQ ID NO: 2856 - protein, 11 aa, Homo sapiens
  Heavy chain CDR3 for antibody 1428 (IGHV3-53)
ARDRVVYGMDV

SEQ ID NO: 2857 - protein, 7 aa, Homo sapiens
  Light chain CDR3 for antibody 1429 (IGKV3-20)
QQYGSSL

SEQ ID NO: 2858 - protein, 14 aa, Homo sapiens
  Heavy chain CDR3 for antibody 1429 (IGHV1-69)
ARYGVSYGDYLPDY

SEQ ID NO: 2859 - protein, 9 aa, Homo sapiens
  Light chain CDR3 for antibody 1430 (IGKV1-9)
QQLNSYPPD

SEQ ID NO: 2860 - protein, 12 aa, Homo sapiens
  Heavy chain CDR3 for antibody 1430 (IGHV3-53)
ARDLTAIRGFDY

SEQ ID NO: 2861 - protein, 7 aa, Homo sapiens
  Light chain CDR3 for antibody 1431 (IGKV3-20)
QQYGSSL

SEQ ID NO: 2862 - protein, 13 aa, Homo sapiens
  Heavy chain CDR3 for antibody 1431 (IGHV5-51)
ARQLCGGDCAFDY

SEQ ID NO: 2863 - protein, 7 aa, Homo sapiens
  Light chain CDR3 for antibody 1432 (IGKV3-20)
QQYGSSL

SEQ ID NO: 2864 - protein, 14 aa, Homo sapiens
  Heavy chain CDR3 for antibody 1432 (IGHV3-53)
ARLFYGGNSAGVDY

SEQ ID NO: 2865 - protein, 8 aa, Homo sapiens
  Light chain CDR3 for antibody 1433 (IGKV3-15)
QQYNNWGT

SEQ ID NO: 2866 - protein, 11 aa, Homo sapiens
  Heavy chain CDR3 for antibody 1433 (IGHV3-53)
ARGHWEYYFDY

SEQ ID NO: 2867 - protein, 8 aa, Homo sapiens
  Light chain CDR3 for antibody 1434 (IGKV3-20)
QQYGSSYT

SEQ ID NO: 2868 - protein, 12 aa, Homo sapiens
  Heavy chain CDR3 for antibody 1434 (IGHV3-53)
ARDLSVAGAFDI

SEQ ID NO: 2869 - protein, 8 aa, Homo sapiens
  Light chain CDR3 for antibody 1435 (IGKV1-12)
QQANSFPL

SEQ ID NO: 2870 - protein, 13 aa, Homo sapiens
  Heavy chain CDR3 for antibody 1435 (IGHV3-53)
ARDGYCRGGSCYH

SEQ ID NO: 2871 - protein, 10 aa, Homo sapiens
  Light chain CDR3 for antibody 1436 (IGKV3-11)
QQRSTWPPLT

SEQ ID NO: 2872 - protein, 11 aa, Homo sapiens
  Heavy chain CDR3 for antibody 1436 (IGHV3-21)
ARQTGYIYFDF

SEQ ID NO: 2873 - protein, 7 aa, Homo sapiens
  Light chain CDR3 for antibody 1437 (IGKV3-20)
QQYGSSL

SEQ ID NO: 2874 - protein, 11 aa, Homo sapiens
  Heavy chain CDR3 for antibody 1437 (IGHV3-21)
AREVSVTDFDY

SEQ ID NO: 2875 - protein, 9 aa, Homo sapiens
  Light chain CDR3 for antibody 1438 (IGKV1-39)
QQTYDTPWT

SEQ ID NO: 2876 - protein, 12 aa, Homo sapiens
  Heavy chain CDR3 for antibody 1438 (IGHV4-4)
ARDATSGLGHDY

SEQ ID NO: 2877 - protein, 10 aa, Homo sapiens
  Light chain CDR3 for antibody 1439 (IGKV1-39)
QQSYSTPPWT

SEQ ID NO: 2878 - protein, 19 aa, Homo sapiens
  Heavy chain CDR3 for antibody 1439 (IGHV3-13)
ARADHYYGSGRAWYYYMDV

SEQ ID NO: 2879 - protein, 9 aa, Homo sapiens
  Light chain CDR3 for antibody 1440 (IGKV1-39)
QQSYITLYS

SEQ ID NO: 2880 - protein, 10 aa, Homo sapiens
  Heavy chain CDR3 for antibody 1440 (IGHV1-2)
ARDPSGPLDF

SEQ ID NO: 2881 - protein, 9 aa, Homo sapiens
  Light chain CDR3 for antibody 1441 (IGKV2D-28)
MQALQTLYT

SEQ ID NO: 2882 - protein, 15 aa, Homo sapiens
  Heavy chain CDR3 for antibody 1441 (IGHV1-69)
AREDGDYGGLRAFDI

SEQ ID NO: 2883 - protein, 9 aa, Homo sapiens
  Light chain CDR3 for antibody 1442 (IGKV1-33)
QQYDNLPLT

SEQ ID NO: 2884 - protein, 18 aa, Homo sapiens
  Heavy chain CDR3 for antibody 1442 (IGHV3-11)
ARDEDPVYCANDVCTLDY

SEQ ID NO: 2885 - protein, 9 aa, Homo sapiens
  Light chain CDR3 for antibody 1443 (IGKV1-33)
QQYDNLPRT

SEQ ID NO: 2886 - protein, 11 aa, Homo sapiens
  Heavy chain CDR3 for antibody 1443 (IGHV3-53)
ARDLAVYGMDV

SEQ ID NO: 2887 - protein, 8 aa, Homo sapiens
  Light chain CDR3 for antibody 1444 (IGKV3-15)
QQYNNWSS

SEQ ID NO: 2888 - protein, 16 aa, Homo sapiens
  Heavy chain CDR3 for antibody 1444 (IGHV1-69)
ARPLRYHVSYYYYMDV

SEQ ID NO: 2889 - protein, 9 aa, Homo sapiens
  Light chain CDR3 for antibody 1445 (IGKV1-9)
QQLNSYPFT

SEQ ID NO: 2890 - protein, 12 aa, Homo sapiens
  Heavy chain CDR3 for antibody 1445 (IGHV1/OR15-9)
ARVEVGATFVDY

SEQ ID NO: 2891 - protein, 9 aa, Homo sapiens
  Light chain CDR3 for antibody 1446 (IGKV1-33)
QQYADLFPT

SEQ ID NO: 2892 - protein, 18 aa, Homo sapiens
  Heavy chain CDR3 for antibody 1446 (IGHV3-11)
ARECGSGESDCSSTSLAD

SEQ ID NO: 2893 - protein, 7 aa, Homo sapiens
  Light chain CDR3 for antibody 1447 (IGKV3-20)
QQYGSSL

SEQ ID NO: 2894 - protein, 11 aa, Homo sapiens
  Heavy chain CDR3 for antibody 1447 (IGHV3-53)
ARDLDYYGMDV

SEQ ID NO: 2895 - protein, 9 aa, Homo sapiens
  Light chain CDR3 for antibody 1448 (IGKV3-20)
QQYGSSLWT

SEQ ID NO: 2896 - protein, 15 aa, Homo sapiens
  Heavy chain CDR3 for antibody 1448 (IGHV1-69)
ARGQGPYSYYYYMDV

SEQ ID NO: 2897 - protein, 9 aa, Homo sapiens
  Light chain CDR3 for antibody 1449 (IGKV1-9)
QQLNSDPPP

SEQ ID NO: 2898 - protein, 13 aa, Homo sapiens
  Heavy chain CDR3 for antibody 1449 (IGHV3-53)
ARDGYCRGGSCYH

SEQ ID NO: 2899 - protein, 7 aa, Homo sapiens
  Light chain CDR3 for antibody 1450 (IGKV3-20)
QQYGSSL

SEQ ID NO: 2900 - protein, 17 aa, Homo sapiens
  Heavy chain CDR3 for antibody 1450 (IGHV1-69)
ARGPPLPSSGWSEIWVY

SEQ ID NO: 2901 - protein, 9 aa, Homo sapiens
  Light chain CDR3 for antibody 1451 (IGKV1-5)
QQYNSYSRT

SEQ ID NO: 2902 - protein, 11 aa, Homo sapiens
  Heavy chain CDR3 for antibody 1451 (IGHV3-53)
ARGHWEYYFDY

SEQ ID NO: 2903 - protein, 9 aa, Homo sapiens
  Light chain CDR3 for antibody 1452 (IGKV1-33)
QQYDNLPRT

SEQ ID NO: 2904 - protein, 11 aa, Homo sapiens
  Heavy chain CDR3 for antibody 1452 (IGHV3-53)
ARDRGSGWYDY

SEQ ID NO: 2905 - protein, 9 aa, Homo sapiens
  Light chain CDR3 for antibody 1453 (IGKV1-39)
QQNLVIPRA

SEQ ID NO: 2906 - protein, 11 aa, Homo sapiens
  Heavy chain CDR3 for antibody 1453 (IGHV3-53)
ARGHWEYYFDY

SEQ ID NO: 2907 - protein, 8 aa, Homo sapiens
  Light chain CDR3 for antibody 1454 (IGKV1-12)
QQANSFPL

SEQ ID NO: 2908 - protein, 16 aa, Homo sapiens
  Heavy chain CDR3 for antibody 1454 (IGHV1-58)
AAPYCSGGSCFDAFDI

SEQ ID NO: 2909 - protein, 9 aa, Homo sapiens
  Light chain CDR3 for antibody 1455 (IGKV1-39)
QQSYSTPRT

SEQ ID NO: 2910 - protein, 15 aa, Homo sapiens
  Heavy chain CDR3 for antibody 1455 (IGHV2-70)
ARMEYGSGSYLAFDI

SEQ ID NO: 2911 - protein, 9 aa, Homo sapiens
  Light chain CDR3 for antibody 1456 (IGKV1-12)
QQANSFPLG

SEQ ID NO: 2912 - protein, 22 aa, Homo sapiens
  Heavy chain CDR3 for antibody 1456 (IGHV1-69)
ARGAAGYYDSFGALILQYYMDV

SEQ ID NO: 2913 - protein, 10 aa, Homo sapiens
  Light chain CDR3 for antibody 1457 (IGKV1-33)
QQYDNLPRYT

SEQ ID NO: 2914 - protein, 11 aa, Homo sapiens
  Heavy chain CDR3 for antibody 1457 (IGHV3-53)
ARGHWEYYFDY

SEQ ID NO: 2915 - protein, 9 aa, Homo sapiens
  Light chain CDR3 for antibody 1458 (IGKV1-33)
QQYDNLPLT

SEQ ID NO: 2916 - protein, 14 aa, Homo sapiens
  Heavy chain CDR3 for antibody 1458 (IGHV3-23)
ATPRGSGWYEPFDY

SEQ ID NO: 2917 - protein, 9 aa, Homo sapiens
  Light chain CDR3 for antibody 1459 (IGKV4-1)
QQYYSPPQT

SEQ ID NO: 2918 - protein, 14 aa, Homo sapiens
  Heavy chain CDR3 for antibody 1459 (IGHV3-h)
ARRGDHDYGEISDY

SEQ ID NO: 2919 - protein, 7 aa, Homo sapiens
  Light chain CDR3 for antibody 1460 (IGKV3-20)
QQYGSSL

SEQ ID NO: 2920 - protein, 19 aa, Homo sapiens
  Heavy chain CDR3 for antibody 1460 (IGHV1-3)
ATGLGKHDYSNYVVDYMDV

SEQ ID NO: 2921 - protein, 8 aa, Homo sapiens
  Light chain CDR3 for antibody 1461 (IGKV1-39)
QQSYSMYT

SEQ ID NO: 2922 - protein, 11 aa, Homo sapiens
  Heavy chain CDR3 for antibody 1461 (IGHV3-53)
ARGHWEYYFDY

SEQ ID NO: 2923 - protein, 9 aa, Homo sapiens
  Light chain CDR3 for antibody 1462 (IGKV3-20)
QQYGSSPGT

SEQ ID NO: 2924 - protein, 15 aa, Homo sapiens
  Heavy chain CDR3 for antibody 1462 (IGHV4-4)
ARVGGSYFGYYGMDV

SEQ ID NO: 2925 - protein, 9 aa, Homo sapiens
  Light chain CDR3 for antibody 1463 (IGKV3-20)
QQYGSSLWT

SEQ ID NO: 2926 - protein, 13 aa, Homo sapiens
  Heavy chain CDR3 for antibody 1463 (IGHV5-51)
ARQLCGGDCAFDY

SEQ ID NO: 2927 - protein, 9 aa, Homo sapiens
  Light chain CDR3 for antibody 1464 (IGKV3-20)
HQYAGAPLT

SEQ ID NO: 2928 - protein, 10 aa, Homo sapiens
  Heavy chain CDR3 for antibody 1464 (IGHV2-5)
AHSSGWLYDF

SEQ ID NO: 2929 - protein, 9 aa, Homo sapiens
  Light chain CDR3 for antibody 1465 (IGKV1-39)
QQSYITLYS

SEQ ID NO: 2930 - protein, 11 aa, Homo sapiens
  Heavy chain CDR3 for antibody 1465 (IGHV1-2)
AREYTSGKSDP

SEQ ID NO: 2931 - protein, 7 aa, Homo sapiens
  Light chain CDR3 for antibody 1466 (IGKV3-20)
QQYGSSL

SEQ ID NO: 2932 - protein, 12 aa, Homo sapiens
  Heavy chain CDR3 for antibody 1466 (IGHV3-53)
AREIPSGSYWDY

SEQ ID NO: 2933 - protein, 7 aa, Homo sapiens
  Light chain CDR3 for antibody 1467 (IGKV3-20)
QQYGSSL

SEQ ID NO: 2934 - protein, 13 aa, Homo sapiens
  Heavy chain CDR3 for antibody 1467 (IGHV1-3)
ARGAVTNYDYFDY

SEQ ID NO: 2935 - protein, 8 aa, Homo sapiens
  Light chain CDR3 for antibody 1468 (IGKV1-12)
QQANSFPL

SEQ ID NO: 2936 - protein, 12 aa, Homo sapiens
  Heavy chain CDR3 for antibody 1468 (IGHV3-53)
ARPTLSRGGMDV

SEQ ID NO: 2937 - protein, 9 aa, Homo sapiens
  Light chain CDR3 for antibody 1469 (IGKV1-39)
QQSYSTPLS

SEQ ID NO: 2938 - protein, 16 aa, Homo sapiens
  Heavy chain CDR3 for antibody 1469 (IGHV1-69)
ARPLRYHVSYYYYMDV

SEQ ID NO: 2939 - protein, 7 aa, Homo sapiens
  Light chain CDR3 for antibody 1470 (IGKV3-20)
QQYGSSL

SEQ ID NO: 2940 - protein, 11 aa, Homo sapiens
  Heavy chain CDR3 for antibody 1470 (IGHV3-53)
ARDLGSSGSDY

SEQ ID NO: 2941 - protein, 8 aa, Homo sapiens
  Light chain CDR3 for antibody 1471 (IGKV4-1)
QQYYSTPS

SEQ ID NO: 2942 - protein, 11 aa, Homo sapiens
  Heavy chain CDR3 for antibody 1471 (IGHV3-53)
ARGHWEYYFDY

SEQ ID NO: 2943 - protein, 9 aa, Homo sapiens
  Light chain CDR3 for antibody 1472 (IGKV1-5)
QQYNSYPRT

SEQ ID NO: 2944 - protein, 15 aa, Homo sapiens
  Heavy chain CDR3 for antibody 1472 (IGHV3-11)
ARGQGPYSYYYYMDV

SEQ ID NO: 2945 - protein, 9 aa, Homo sapiens
  Light chain CDR3 for antibody 1473 (IGKV1-33)
QQYDNLPRT

SEQ ID NO: 2946 - protein, 11 aa, Homo sapiens
  Heavy chain CDR3 for antibody 1473 (IGHV3-53)
ARDYGDFYFDY

SEQ ID NO: 2947 - protein, 9 aa, Homo sapiens
  Light chain CDR3 for antibody 1474 (IGKV1-33)
QQYDNLPRT

SEQ ID NO: 2948 - protein, 17 aa, Homo sapiens
  Heavy chain CDR3 for antibody 1474 (IGHV1-69)
ARGPPLPSSGWSEIWVY

SEQ ID NO: 2949 - protein, 7 aa, Homo sapiens
  Light chain CDR3 for antibody 1475 (IGKV3-20)
QQYGSSL

SEQ ID NO: 2950 - protein, 14 aa, Homo sapiens
  Heavy chain CDR3 for antibody 1475 (IGHV4-39)
ASGDYGDYHRGFDY

SEQ ID NO: 2951 - protein, 9 aa, Homo sapiens
  Light chain CDR3 for antibody 1476 (IGKV1-9)
QQLNSDPPP

SEQ ID NO: 2952 - protein, 16 aa, Homo sapiens
  Heavy chain CDR3 for antibody 1476 (IGHV1-58)
AAPYCSGGSCFDAFDI

SEQ ID NO: 2953 - protein, 7 aa, Homo sapiens
  Light chain CDR3 for antibody 1477 (IGKV3-20)
QQYGSSL

SEQ ID NO: 2954 - protein, 16 aa, Homo sapiens
  Heavy chain CDR3 for antibody 1477 (IGHV3-30)
AKPLFTYSYGQNYFDY

SEQ ID NO: 2955 - protein, 7 aa, Homo sapiens
  Light chain CDR3 for antibody 1478 (IGKV3-20)
QQYGSSL

SEQ ID NO: 2956 - protein, 12 aa, Homo sapiens
  Heavy chain CDR3 for antibody 1478 (IGHV3-53)
ARAPLGTDYFDS

SEQ ID NO: 2957 - protein, 9 aa, Homo sapiens
  Light chain CDR3 for antibody 1479 (IGKV1-5)
QEYNRYSYT

SEQ ID NO: 2958 - protein, 16 aa, Homo sapiens
  Heavy chain CDR3 for antibody 1479 (IGHV4-59)
ARDGDGSGIGLYGMNV

SEQ ID NO: 2959 - protein, 10 aa, Homo sapiens
  Light chain CDR3 for antibody 1480 (IGKV3-15)
QQYYHWPPIT

SEQ ID NO: 2960 - protein, 18 aa, Homo sapiens
  Heavy chain CDR3 for antibody 1480 (IGHV4-39)
RSDCSATSCPYDSYGVDV

SEQ ID NO: 2961 - protein, 9 aa, Homo sapiens
  Light chain CDR3 for antibody 1481 (IGKV1-27)
LQHNSYPLT

SEQ ID NO: 2962 - protein, 15 aa, Homo sapiens
  Heavy chain CDR3 for antibody 1481 (IGHV1-69)
ARENPYDSSGWYSDY

SEQ ID NO: 2963 - protein, 9 aa, Homo sapiens
  Light chain CDR3 for antibody 1482 (IGKV1-39)
QQSYSTPRT

SEQ ID NO: 2964 - protein, 14 aa, Homo sapiens
  Heavy chain CDR3 for antibody 1482 (IGHV1-18)
ARDGYGDSLADFDY

SEQ ID NO: 2965 - protein, 9 aa, Homo sapiens
  Light chain CDR3 for antibody 1483 (IGKV1-17)
LQHSSYPWA

SEQ ID NO: 2966 - protein, 21 aa, Homo sapiens
  Heavy chain CDR3 for antibody 1483 (IGHV1-24)
AVRPALYRTFSGYKYGDPFDH

SEQ ID NO: 2967 - protein, 9 aa, Homo sapiens
  Light chain CDR3 for antibody 1484 (IGKV1-5)
QHYNIYPYT

SEQ ID NO: 2968 - protein, 11 aa, Homo sapiens
  Heavy chain CDR3 for antibody 1484 (IGHV3-53)
ARDRVVYGMDV

SEQ ID NO: 2969 - protein, 8 aa, Homo sapiens
  Light chain CDR3 for antibody 1485 (IGKV1-5)
QQYSAHIT

SEQ ID NO: 2970 - protein, 17 aa, Homo sapiens
  Heavy chain CDR3 for antibody 1485 (IGHV5-51)
ARRQGRWYRGMFHYMDV

SEQ ID NO: 2971 - protein, 10 aa, Homo sapiens
  Light chain CDR3 for antibody 1486 (IGKV3-11)
QQRSNWPAGT

SEQ ID NO: 2972 - protein, 16 aa, Homo sapiens
  Heavy chain CDR3 for antibody 1486 (IGHV1-58)
AAPYCSGGSCFDAFDI

SEQ ID NO: 2973 - protein, 8 aa, Homo sapiens
  Light chain CDR3 for antibody 1487 (IGKV1-5)
QQYNSYSA

SEQ ID NO: 2974 - protein, 16 aa, Homo sapiens
  Heavy chain CDR3 for antibody 1487 (IGHV1-69)
AAPYCSGGSCFDAFDI

SEQ ID NO: 2975 - protein, 9 aa, Homo sapiens
  Light chain CDR3 for antibody 1488 (IGKV1-9)
QQLNSDPPP

SEQ ID NO: 2976 - protein, 12 aa, Homo sapiens
  Heavy chain CDR3 for antibody 1488 (IGHV3-53)
ARPTLSRGGMDV

SEQ ID NO: 2977 - protein, 9 aa, Homo sapiens
  Light chain CDR3 for antibody 1489 (IGKV1-27)
QKYNSVSDT

SEQ ID NO: 2978 - protein, 11 aa, Homo sapiens
  Heavy chain CDR3 for antibody 1489 (IGHV3-53)
ARDRYSYGLDY

SEQ ID NO: 2979 - protein, 7 aa, Homo sapiens
  Light chain CDR3 for antibody 1490 (IGKV3-20)
QQYGSSL

SEQ ID NO: 2980 - protein, 11 aa, Homo sapiens
  Heavy chain CDR3 for antibody 1490 (IGHV3-53)
ARDRGGDVFDI

SEQ ID NO: 2981 - protein, 10 aa, Homo sapiens
  Light chain CDR3 for antibody 1491 (IGKV1-39)
QQNYDTLALT

SEQ ID NO: 2982 - protein, 18 aa, Homo sapiens
  Heavy chain CDR3 for antibody 1491 (IGHV1-2)
AREPRYNNHDDAAGAFDI

SEQ ID NO: 2983 - protein, 10 aa, Homo sapiens
  Light chain CDR3 for antibody 1492 (IGKV1-12)
QQANSFRSWT

SEQ ID NO: 2984 - protein, 14 aa, Homo sapiens
  Heavy chain CDR3 for antibody 1492 (IGHV1-18)
AQTRYITGGYYFDS

SEQ ID NO: 2985 - protein, 9 aa, Homo sapiens
  Light chain CDR3 for antibody 1493 (IGKV1-9)
QQLNSDPPP

SEQ ID NO: 2986 - protein, 13 aa, Homo sapiens
  Heavy chain CDR3 for antibody 1493 (IGHV5-51)
ARQLCGGDCAFDY

SEQ ID NO: 2987 - protein, 8 aa, Homo sapiens
  Light chain CDR3 for antibody 1494 (IGKV1-5)
QQYNSYSA

SEQ ID NO: 2988 - protein, 11 aa, Homo sapiens
  Heavy chain CDR3 for antibody 1494 (IGHV3-53)
ARGHWEYYFDY

SEQ ID NO: 2989 - protein, 10 aa, Homo sapiens
  Light chain CDR3 for antibody 1495 (IGKV3-20)
QQYGSSPPWT

SEQ ID NO: 2990 - protein, 11 aa, Homo sapiens
  Heavy chain CDR3 for antibody 1495 (IGHV3-53)
ARGHWEYYFDY

SEQ ID NO: 2991 - protein, 9 aa, Homo sapiens
  Light chain CDR3 for antibody 1496 (IGKV1-33)
QQYDNLPRT

SEQ ID NO: 2992 - protein, 14 aa, Homo sapiens
  Heavy chain CDR3 for antibody 1496 (IGHV1-69)
AREVEMATLYGMDV

SEQ ID NO: 2993 - protein, 9 aa, Homo sapiens
  Light chain CDR3 for antibody 1497 (IGKV1-27)
QKYNSVSDT

SEQ ID NO: 2994 - protein, 16 aa, Homo sapiens
  Heavy chain CDR3 for antibody 1497 (IGHV1-58)
AAPYCSGGSCFDAFDI

SEQ ID NO: 2995 - protein, 9 aa, Homo sapiens
  Light chain CDR3 for antibody 1498 (IGKV1-27)
QKYNSAPWT

SEQ ID NO: 2996 - protein, 18 aa, Homo sapiens
  Heavy chain CDR3 for antibody 1498 (IGHV3-73)
TTHYGSGRPDYYYYYMDV

SEQ ID NO: 2997 - protein, 9 aa, Homo sapiens
  Light chain CDR3 for antibody 1499 (IGKV1-9)
QQLNSDPPP

SEQ ID NO: 2998 - protein, 11 aa, Homo sapiens
  Heavy chain CDR3 for antibody 1499 (IGHV3-53)
ARDRYSYGLDY

SEQ ID NO: 2999 - protein, 9 aa, Homo sapiens
  Light chain CDR3 for antibody 1500 (IGKV1-39)
QQSYSTPRT

SEQ ID NO: 3000 - protein, 16 aa, Homo sapiens
  Heavy chain CDR3 for antibody 1500 (IGHV1-69)
ARESWYSSSRLSWFDP

SEQ ID NO: 3001 - protein, 7 aa, Homo sapiens
  Light chain CDR3 for antibody 1501 (IGKV3-20)
QQYGSSL

SEQ ID NO: 3002 - protein, 14 aa, Homo sapiens
  Heavy chain CDR3 for antibody 1501 (IGHV1-69)
AREVEMATLYGMDV

SEQ ID NO: 3003 - protein, 10 aa, Homo sapiens
  Light chain CDR3 for antibody 1502 (IGKV1-39)
QQSYTTFMYT

SEQ ID NO: 3004 - protein, 14 aa, Homo sapiens
  Heavy chain CDR3 for antibody 1502 (IGHV3-64)
AREEGQWLVLYFRY

SEQ ID NO: 3005 - protein, 9 aa, Homo sapiens
  Light chain CDR3 for antibody 1503 (IGKV1-33)
QQYDNLPQT

SEQ ID NO: 3006 - protein, 11 aa, Homo sapiens
  Heavy chain CDR3 for antibody 1503 (IGHV3-53)
ARDRVVYGMDV

SEQ ID NO: 3007 - protein, 9 aa, Homo sapiens
  Light chain CDR3 for antibody 1504 (IGKV1-33)
QQYDNLPRT

SEQ ID NO: 3008 - protein, 12 aa, Homo sapiens
  Heavy chain CDR3 for antibody 1504 (IGHV3-53)
AREIPSGSYWDY

SEQ ID NO: 3009 - protein, 7 aa, Homo sapiens
  Light chain CDR3 for antibody 1505 (IGKV3-20)
QQYGSSL

SEQ ID NO: 3010 - protein, 21 aa, Homo sapiens
  Heavy chain CDR3 for antibody 1505 (IGHV2-5)
AQRLGYCSSTSCYNRFVAFDI

SEQ ID NO: 3011 - protein, 9 aa, Homo sapiens
  Light chain CDR3 for antibody 1506 (IGKV3-20)
QQYGSSLWT

SEQ ID NO: 3012 - protein, 11 aa, Homo sapiens
  Heavy chain CDR3 for antibody 1506 (IGHV3-53)
ARDLDYYGMDV

SEQ ID NO: 3013 - protein, 8 aa, Homo sapiens
  Light chain CDR3 for antibody 1507 (IGKV1-12)
QQANSFPL

SEQ ID NO: 3014 - protein, 11 aa, Homo sapiens
  Heavy chain CDR3 for antibody 1507 (IGHV3-53)
ARDRGSGWYDY

SEQ ID NO: 3015 - protein, 9 aa, Homo sapiens
  Light chain CDR3 for antibody 1508 (IGKV1-9)
QQLNSYPLT

SEQ ID NO: 3016 - protein, 11 aa, Homo sapiens
  Heavy chain CDR3 for antibody 1508 (IGHV3-53)
ARDRYSYGLDY

SEQ ID NO: 3017 - protein, 7 aa, Homo sapiens
  Light chain CDR3 for antibody 1509 (IGKV3-20)
QQYGSSL

SEQ ID NO: 3018 - protein, 18 aa, Homo sapiens
  Heavy chain CDR3 for antibody 1509 (IGHV4/OR15-8)
ARVSPFEGALRFSLGFDP

SEQ ID NO: 3019 - protein, 7 aa, Homo sapiens
  Light chain CDR3 for antibody 1510 (IGKV3-20)
QQYGSSL

SEQ ID NO: 3020 - protein, 12 aa, Homo sapiens
  Heavy chain CDR3 for antibody 1510 (IGHV3-15)
TTDSRTLYALDV

SEQ ID NO: 3021 - protein, 10 aa, Homo sapiens
  Light chain CDR3 for antibody 1511 (IGKV3-11)
QQRSNWPAGT

SEQ ID NO: 3022 - protein, 15 aa, Homo sapiens
  Heavy chain CDR3 for antibody 1511 (IGHV1-69)
ARGQGPYSYYYYMDV

SEQ ID NO: 3023 - protein, 10 aa, Homo sapiens
  Light chain CDR3 for antibody 1512 (IGKV1-39)
QQSYSNGSGT

SEQ ID NO: 3024 - protein, 11 aa, Homo sapiens
  Heavy chain CDR3 for antibody 1512 (IGHV3-53)
ARDRVVYGMDV

SEQ ID NO: 3025 - protein, 8 aa, Homo sapiens
  Light chain CDR3 for antibody 1513 (IGKV3-20)
QQYGSSYT

SEQ ID NO: 3026 - protein, 11 aa, Homo sapiens
  Heavy chain CDR3 for antibody 1513 (IGHV3-53)
ARGHWEYYFDY

SEQ ID NO: 3027 - protein, 9 aa, Homo sapiens
  Light chain CDR3 for antibody 1514 (IGKV1-33)
QQYDNLPRT

SEQ ID NO: 3028 - protein, 19 aa, Homo sapiens
  Heavy chain CDR3 for antibody 1514 (IGHV3-53)
ARGVRYCSGGSCYGAHFQH

SEQ ID NO: 3029 - protein, 9 aa, Homo sapiens
  Light chain CDR3 for antibody 1515 (IGKV1-27)
QKYNSVSDT

SEQ ID NO: 3030 - protein, 13 aa, Homo sapiens
  Heavy chain CDR3 for antibody 1515 (IGHV3-53)
ARDGYCRGGSCYH

SEQ ID NO: 3031 - protein, 12 aa, Homo sapiens
  Light chain CDR3 for antibody 1516 (IGKV1-9)
QQLNSYPQNGLT

SEQ ID NO: 3032 - protein, 11 aa, Homo sapiens
  Heavy chain CDR3 for antibody 1516 (IGHV3-53)
ARGHWEYYFDY

SEQ ID NO: 3033 - protein, 7 aa, Homo sapiens
  Light chain CDR3 for antibody 1517 (IGKV3-20)
QQYGSSL

SEQ ID NO: 3034 - protein, 9 aa, Homo sapiens
  Heavy chain CDR3 for antibody 1517 (IGHV3-53)
AREGYGMDV

SEQ ID NO: 3035 - protein, 10 aa, Homo sapiens
  Light chain CDR3 for antibody 1518 (IGKV1-39)
QQSYSTPPWT

SEQ ID NO: 3036 - protein, 11 aa, Homo sapiens
  Heavy chain CDR3 for antibody 1518 (IGHV3-53)
ARDRGSGWYDY

SEQ ID NO: 3037 - protein, 9 aa, Homo sapiens
  Light chain CDR3 for antibody 1519 (IGKV1-12)
QQANSFPPT

SEQ ID NO: 3038 - protein, 11 aa, Homo sapiens
  Heavy chain CDR3 for antibody 1519 (IGHV3-53)
ARGHWEYYFDY

SEQ ID NO: 3039 - protein, 8 aa, Homo sapiens
  Light chain CDR3 for antibody 1520 (IGKV1-12)
QQANSFPL

SEQ ID NO: 3040 - protein, 9 aa, Homo sapiens
  Heavy chain CDR3 for antibody 1520 (IGHV3-53)
ARDAPENGD

SEQ ID NO: 3041 - protein, 9 aa, Homo sapiens
  Light chain CDR3 for antibody 1521 (IGKV1-9)
QQLNSYPLT

SEQ ID NO: 3042 - protein, 13 aa, Homo sapiens
  Heavy chain CDR3 for antibody 1521 (IGHV3-53)
ARDGYCRGGSCNH

SEQ ID NO: 3043 - protein, 8 aa, Homo sapiens
  Light chain CDR3 for antibody 1522 (IGKV1-5)
QQYNSYSA

SEQ ID NO: 3044 - protein, 15 aa, Homo sapiens
  Heavy chain CDR3 for antibody 1522 (IGHV1-69)
ARGQGPYSYYYYMDV

SEQ ID NO: 3045 - protein, 7 aa, Homo sapiens
  Light chain CDR3 for antibody 1523 (IGKV3-20)
QQYGSSL

SEQ ID NO: 3046 - protein, 19 aa, Homo sapiens
  Heavy chain CDR3 for antibody 1523 (IGHV1-69)
AEGRALTLSYSSSYGAFDY

SEQ ID NO: 3047 - protein, 9 aa, Homo sapiens
  Light chain CDR3 for antibody 1524 (IGKV3-20)
QQYGSSPRT

SEQ ID NO: 3048 - protein, 9 aa, Homo sapiens
  Heavy chain CDR3 for antibody 1524 (IGHV3-53)
ARDAPENGD

SEQ ID NO: 3049 - protein, 9 aa, Homo sapiens
  Light chain CDR3 for antibody 1525 (IGKV3-20)
QQYGSSLWT

SEQ ID NO: 3050 - protein, 19 aa, Homo sapiens
  Heavy chain CDR3 for antibody 1525 (IGHV1-3)
ATGLGKHDYSNYVVDYMDV

SEQ ID NO: 3051 - protein, 9 aa, Homo sapiens
  Light chain CDR3 for antibody 1526 (IGKV2D-28)
MQALQTPHT

SEQ ID NO: 3052 - protein, 16 aa, Homo sapiens
  Heavy chain CDR3 for antibody 1526 (IGHV1-58)
AAPYCSGGSCFDAFDI

SEQ ID NO: 3053 - protein, 9 aa, Homo sapiens
  Light chain CDR3 for antibody 1527 (IGKV3-20)
QQYGSSLWT

SEQ ID NO: 3054 - protein, 11 aa, Homo sapiens
  Heavy chain CDR3 for antibody 1527 (IGHV1-58)
ARDRYSYGLDY

SEQ ID NO: 3055 - protein, 7 aa, Homo sapiens
  Light chain CDR3 for antibody 1528 (IGKV3-20)
QQYGSSL

SEQ ID NO: 3056 - protein, 11 aa, Homo sapiens
  Heavy chain CDR3 for antibody 1528 (IGHV3-53)
ARGDWEWCFDY

SEQ ID NO: 3057 - protein, 9 aa, Homo sapiens
  Light chain CDR3 for antibody 1529 (IGKV1-39)
QQSYTTPWT

SEQ ID NO: 3058 - protein, 14 aa, Homo sapiens
  Heavy chain CDR3 for antibody 1529 (IGHV1-2)
ARDVARNNSAWIDY

SEQ ID NO: 3059 - protein, 10 aa, Homo sapiens
  Light chain CDR3 for antibody 1530 (IGKV1-39)
QQSYSTPPWT

SEQ ID NO: 3060 - protein, 11 aa, Homo sapiens
  Heavy chain CDR3 for antibody 1530 (IGHV3-33)
ARDRVVYGMDV

SEQ ID NO: 3061 - protein, 9 aa, Homo sapiens
  Light chain CDR3 for antibody 1531 (IGKV1-5)
QHYNIYPYT

SEQ ID NO: 3062 - protein, 13 aa, Homo sapiens
  Heavy chain CDR3 for antibody 1531 (IGHV3-53)
ARDGYCRGGSCYH

SEQ ID NO: 3063 - protein, 9 aa, Homo sapiens
  Light chain CDR3 for antibody 1532 (IGKV1-39)
QQSYNIHRT

SEQ ID NO: 3064 - protein, 12 aa, Homo sapiens
  Heavy chain CDR3 for antibody 1532 (IGHV3-15)
TTDSRTLYALDV

SEQ ID NO: 3065 - protein, 10 aa, Homo sapiens
  Light chain CDR3 for antibody 1533 (IGKV3-11)
QQRSNWPAGT

SEQ ID NO: 3066 - protein, 11 aa, Homo sapiens
  Heavy chain CDR3 for antibody 1533 (IGHV3-53)
ARDLVVYGMDV

SEQ ID NO: 3067 - protein, 9 aa, Homo sapiens
  Light chain CDR3 for antibody 1534 (IGKV1-33)
QQYDNLPQT

SEQ ID NO: 3068 - protein, 11 aa, Homo sapiens
  Heavy chain CDR3 for antibody 1534 (IGHV5-51)
ARSPTTNTFDY

SEQ ID NO: 3069 - protein, 9 aa, Homo sapiens
  Light chain CDR3 for antibody 1535 (IGKV1-39)
QQNLVIPRA

SEQ ID NO: 3070 - protein, 12 aa, Homo sapiens
  Heavy chain CDR3 for antibody 1535 (IGHV3-15)
TTIRSPLYPFDY

SEQ ID NO: 3071 - protein, 10 aa, Homo sapiens
  Light chain CDR3 for antibody 1536 (IGKV3-15)
QQYNNWPPIT

SEQ ID NO: 3072 - protein, 19 aa, Homo sapiens
  Heavy chain CDR3 for antibody 1536 (IGHV3/OR16-1)
ARGPRTCTTTSCHPYAFGD

SEQ ID NO: 3073 - protein, 9 aa, Homo sapiens
  Light chain CDR3 for antibody 1537 (IGKV1-9)
QQLNSDPPP

SEQ ID NO: 3074 - protein, 11 aa, Homo sapiens
  Heavy chain CDR3 for antibody 1537 (IGHV3-53)
ARDYGDFYFDY

SEQ ID NO: 3075 - protein, 9 aa, Homo sapiens
  Light chain CDR3 for antibody 1538 (IGKV3-20)
QQYGSSLWT

SEQ ID NO: 3076 - protein, 13 aa, Homo sapiens
  Heavy chain CDR3 for antibody 1538 (IGHV3-53)
ARDGYCRGGSCNH

SEQ ID NO: 3077 - protein, 9 aa, Homo sapiens
  Light chain CDR3 for antibody 1539 (IGKV1-5)
QHYNIYPYT

SEQ ID NO: 3078 - protein, 13 aa, Homo sapiens
  Heavy chain CDR3 for antibody 1539 (IGHV5-51)
ARQLCGGDCAFDY

SEQ ID NO: 3079 - protein, 10 aa, Homo sapiens
  Light chain CDR3 for antibody 1540 (IGKV1-39)
QQSYSTPPWT

SEQ ID NO: 3080 - protein, 9 aa, Homo sapiens
  Heavy chain CDR3 for antibody 1540 (IGHV3-53)
ARDAPENGD

SEQ ID NO: 3081 - protein, 11 aa, Homo sapiens
  Light chain CDR3 for antibody 1541 (IGKV3-11)
QQRSNWPPRYT

SEQ ID NO: 3082 - protein, 12 aa, Homo sapiens
  Heavy chain CDR3 for antibody 1541 (IGHV1/OR15-9)
ARVEVGATFVDY

SEQ ID NO: 3083 - protein, 8 aa, Homo sapiens
  Light chain CDR3 for antibody 1542 (IGKV1-12)
QQANSFPL

SEQ ID NO: 3084 - protein, 12 aa, Homo sapiens
  Heavy chain CDR3 for antibody 1542 (IGHV3-53)
AREIPSGSYWDY

SEQ ID NO: 3085 - protein, 8 aa, Homo sapiens
  Light chain CDR3 for antibody 1543 (IGKV1-39)
QQYYSTPS

SEQ ID NO: 3086 - protein, 16 aa, Homo sapiens
  Heavy chain CDR3 for antibody 1543 (IGHV1-58)
AAPYCSGGSCFDAFDI

SEQ ID NO: 3087 - protein, 9 aa, Homo sapiens
  Light chain CDR3 for antibody 1544 (IGKV3-20)
QQYGSSLWT

SEQ ID NO: 3088 - protein, 11 aa, Homo sapiens
  Heavy chain CDR3 for antibody 1544 (IGHV1-69)
ARDLVVYGMDV

SEQ ID NO: 3089 - protein, 8 aa, Homo sapiens
  Light chain CDR3 for antibody 1545 (IGKV1-39)
QQSYSMYT

SEQ ID NO: 3090 - protein, 11 aa, Homo sapiens
  Heavy chain CDR3 for antibody 1545 (IGHV3-53)
ARDRYSYGLDY

SEQ ID NO: 3091 - protein, 9 aa, Homo sapiens
  Light chain CDR3 for antibody 1546 (IGKV1-33)
QQYDNLPQT

SEQ ID NO: 3092 - protein, 11 aa, Homo sapiens
  Heavy chain CDR3 for antibody 1546 (IGHV3-53)
ARDRGGDVFDI

SEQ ID NO: 3093 - protein, 8 aa, Homo sapiens
  Light chain CDR3 for antibody 1547 (IGKV1-12)
QQANSFPL

SEQ ID NO: 3094 - protein, 13 aa, Homo sapiens
  Heavy chain CDR3 for antibody 1547 (IGHV5-51)
ARQLCGGDCAFDY

SEQ ID NO: 3095 - protein, 9 aa, Homo sapiens
  Light chain CDR3 for antibody 1548 (IGKV1-33)
QQYDNLPQT

SEQ ID NO: 3096 - protein, 11 aa, Homo sapiens
  Heavy chain CDR3 for antibody 1548 (IGHV3-21)
AREVSVTDFDY

SEQ ID NO: 3097 - protein, 7 aa, Homo sapiens
  Light chain CDR3 for antibody 1549 (IGKV3-20)
QQYGSSL

SEQ ID NO: 3098 - protein, 11 aa, Homo sapiens
  Heavy chain CDR3 for antibody 1549 (IGHV5-51)
ARSPTTNTFDY

SEQ ID NO: 3099 - protein, 9 aa, Homo sapiens
  Light chain CDR3 for antibody 1550 (IGKV1-33)
QQYDNLPRT

SEQ ID NO: 3100 - protein, 13 aa, Homo sapiens
  Heavy chain CDR3 for antibody 1550 (IGHV3-38)
ARDGYCRGGSFDH

SEQ ID NO: 3101 - protein, 9 aa, Homo sapiens
  Light chain CDR3 for antibody 1551 (IGKV1-5)
QHYNIYPYT

SEQ ID NO: 3102 - protein, 16 aa, Homo sapiens
  Heavy chain CDR3 for antibody 1551 (IGHV1-58)
AAPYCSGGSCFDAFDI

SEQ ID NO: 3103 - protein, 10 aa, Homo sapiens
  Light chain CDR3 for antibody 1552 (IGKV1-9)
QQLNSYPGFT

SEQ ID NO: 3104 - protein, 11 aa, Homo sapiens
  Heavy chain CDR3 for antibody 1552 (IGHV3-53)
ARDRYSYGLDY

SEQ ID NO: 3105 - protein, 9 aa, Homo sapiens
  Light chain CDR3 for antibody 1553 (IGKV1-39)
QQSSSTPWT

SEQ ID NO: 3106 - protein, 14 aa, Homo sapiens
  Heavy chain CDR3 for antibody 1553 (IGHV1-18)
ARYGYRDYNKRYDS

SEQ ID NO: 3107 - protein, 9 aa, Homo sapiens
  Light chain CDR3 for antibody 1554 (IGKV1-39)
QQSYSTPLT

SEQ ID NO: 3108 - protein, 13 aa, Homo sapiens
  Heavy chain CDR3 for antibody 1554 (IGHV3-23)
AKDSRGSTDYFDY

SEQ ID NO: 3109 - protein, 9 aa, Homo sapiens
  Light chain CDR3 for antibody 1555 (IGKV1-33)
QQYDNLPQT

SEQ ID NO: 3110 - protein, 11 aa, Homo sapiens
  Heavy chain CDR3 for antibody 1555 (IGHV3-53)
ARDLDYYGMDV

SEQ ID NO: 3111 - protein, 10 aa, Homo sapiens
  Light chain CDR3 for antibody 1556 (IGKV1-39)
QQSYNTRALT

SEQ ID NO: 3112 - protein, 11 aa, Homo sapiens
  Heavy chain CDR3 for antibody 1556 (IGHV3-53)
ARGHWEYYFDY

SEQ ID NO: 3113 - protein, 9 aa, Homo sapiens
  Light chain CDR3 for antibody 1557 (IGKV1-9)
QQLNSDPPP

SEQ ID NO: 3114 - protein, 12 aa, Homo sapiens
  Heavy chain CDR3 for antibody 1557 (IGHV3-53)
ARDLFEAGGMDV

SEQ ID NO: 3115 - protein, 9 aa, Homo sapiens
  Light chain CDR3 for antibody 1558 (IGKV1-39)
QQSYSTPLT

SEQ ID NO: 3116 - protein, 10 aa, Homo sapiens
  Heavy chain CDR3 for antibody 1558 (IGHV1-18)
ARDYYYGMDV

SEQ ID NO: 3117 - protein, 9 aa, Homo sapiens
  Light chain CDR3 for antibody 1559 (IGKV1-33)
QQYDNLPRT

SEQ ID NO: 3118 - protein, 15 aa, Homo sapiens
  Heavy chain CDR3 for antibody 1559 (IGHV1-69)
ARGQGPYSYYYYMDV

SEQ ID NO: 3119 - protein, 9 aa, Homo sapiens
  Light chain CDR3 for antibody 1560 (IGKV1-5)
QHYNIYPYT

SEQ ID NO: 3120 - protein, 11 aa, Homo sapiens
  Heavy chain CDR3 for antibody 1560 (IGHV3-53)
ARDYGDFYFDY

SEQ ID NO: 3121 - protein, 7 aa, Homo sapiens
  Light chain CDR3 for antibody 1561 (IGKV3-20)
QQYGSSL

SEQ ID NO: 3122 - protein, 11 aa, Homo sapiens
  Heavy chain CDR3 for antibody 1561 (IGHV3-53)
ARAYGDLHFDY

SEQ ID NO: 3123 - protein, 9 aa, Homo sapiens
  Light chain CDR3 for antibody 1562 (IGKV1-9)
QQLNSDPPP

SEQ ID NO: 3124 - protein, 13 aa, Homo sapiens
  Heavy chain CDR3 for antibody 1562 (IGHV3-23)
AKDSRGSTDYFDY

SEQ ID NO: 3125 - protein, 9 aa, Homo sapiens
  Light chain CDR3 for antibody 1563 (IGKV1-5)
QHYNIYPYT

SEQ ID NO: 3126 - protein, 11 aa, Homo sapiens
  Heavy chain CDR3 for antibody 1563 (IGHV3-53)
ARDRYSYGLDY

SEQ ID NO: 3127 - protein, 10 aa, Homo sapiens
  Light chain CDR3 for antibody 1564 (IGKV3-15)
QQYNKWPPWT

SEQ ID NO: 3128 - protein, 13 aa, Homo sapiens
  Heavy chain CDR3 for antibody 1564 (IGHV3-53)
AKAVGTLRYYMDV

SEQ ID NO: 3129 - protein, 10 aa, Homo sapiens
  Light chain CDR3 for antibody 1565 (IGKV1-39)
QQSYSTPPWT

SEQ ID NO: 3130 - protein, 14 aa, Homo sapiens
  Heavy chain CDR3 for antibody 1565 (IGHV1-69)
AREVEMATLYGMDV

SEQ ID NO: 3131 - protein, 10 aa, Homo sapiens
  Light chain CDR3 for antibody 1566 (IGKV1-39)
QQSYSTPPIT

SEQ ID NO: 3132 - protein, 12 aa, Homo sapiens
  Heavy chain CDR3 for antibody 1566 (IGHV3-13)
ARPTLSRGGMDV

SEQ ID NO: 3133 - protein, 10 aa, Homo sapiens
  Light chain CDR3 for antibody 1567 (IGKV1-39)
QQSYVTPGLT

SEQ ID NO: 3134 - protein, 13 aa, Homo sapiens
  Heavy chain CDR3 for antibody 1567 (IGHV5-51)
ARQLCGGDCAFDY

SEQ ID NO: 3135 - protein, 9 aa, Homo sapiens
  Light chain CDR3 for antibody 1568 (IGKV3-20)
QQYGSSLWT

SEQ ID NO: 3136 - protein, 11 aa, Homo sapiens
  Heavy chain CDR3 for antibody 1568 (IGHV3-53)
ARDRGSGWYDY

SEQ ID NO: 3137 - protein, 9 aa, Homo sapiens
  Light chain CDR3 for antibody 1569 (IGKV1-5)
QHYNIYPYT

SEQ ID NO: 3138 - protein, 12 aa, Homo sapiens
  Heavy chain CDR3 for antibody 1569 (IGHV3-53)
ARPTLSRGGMDV

SEQ ID NO: 3139 - protein, 8 aa, Homo sapiens
  Light chain CDR3 for antibody 1570 (IGKV1-12)
QQANSFPL

SEQ ID NO: 3140 - protein, 15 aa, Homo sapiens
  Heavy chain CDR3 for antibody 1570 (IGHV1-69)
ARGQGPYSYYYYMDV

SEQ ID NO: 3141 - protein, 9 aa, Homo sapiens
  Light chain CDR3 for antibody 1571 (IGKV1-12)
QQANSFPWT

SEQ ID NO: 3142 - protein, 11 aa, Homo sapiens
  Heavy chain CDR3 for antibody 1571 (IGHV3-53)
ARDRVVYGMDV

SEQ ID NO: 3143 - protein, 9 aa, Homo sapiens
  Light chain CDR3 for antibody 1572 (IGKV1-33)
QQYDNLPQT

SEQ ID NO: 3144 - protein, 14 aa, Homo sapiens
  Heavy chain CDR3 for antibody 1572 (IGHV4-39)
ASGDYGDYHRGFDY

SEQ ID NO: 3145 - protein, 7 aa, Homo sapiens
  Light chain CDR3 for antibody 1573 (IGKV3-20)
QQYGSSL

SEQ ID NO: 3146 - protein, 19 aa, Homo sapiens
  Heavy chain CDR3 for antibody 1573 (IGHV1-69)
ARGVRYCSGGSCYGAHFQH

SEQ ID NO: 3147 - protein, 9 aa, Homo sapiens
  Light chain CDR3 for antibody 1574 (IGKV1-33)
QQYDNLPRT

SEQ ID NO: 3148 - protein, 13 aa, Homo sapiens
  Heavy chain CDR3 for antibody 1574 (IGHV1-3)
ARGAVTNYDYFDY

SEQ ID NO: 3149 - protein, 10 aa, Homo sapiens
  Light chain CDR3 for antibody 1575 (IGKV1-9)
QQLNSYPPVT

SEQ ID NO: 3150 - protein, 11 aa, Homo sapiens
  Heavy chain CDR3 for antibody 1575 (IGHV3-53)
ARDRVVYGMDV

SEQ ID NO: 3151 - protein, 9 aa, Homo sapiens
  Light chain CDR3 for antibody 1576 (IGKV1-5)
QHYNIYPYT

SEQ ID NO: 3152 - protein, 11 aa, Homo sapiens
  Heavy chain CDR3 for antibody 1576 (IGHV3-53)
ARDRGSGWYDY

SEQ ID NO: 3153 - protein, 10 aa, Homo sapiens
  Light chain CDR3 for antibody 1577 (IGKV1-33)
QQYDNLPQYN

SEQ ID NO: 3154 - protein, 13 aa, Homo sapiens
  Heavy chain CDR3 for antibody 1577 (IGHV3-53)
ARDGYCRGGSCYH

SEQ ID NO: 3155 - protein, 7 aa, Homo sapiens
  Light chain CDR3 for antibody 1578 (IGKV2-30)
MQGSPGT

SEQ ID NO: 3156 - protein, 12 aa, Homo sapiens
  Heavy chain CDR3 for antibody 1578 (IGHV1-18)
ARAHSSGSAFDP

SEQ ID NO: 3157 - protein, 10 aa, Homo sapiens
  Light chain CDR3 for antibody 1579 (IGKV1-9)
QQLNSYPGYT

SEQ ID NO: 3158 - protein, 16 aa, Homo sapiens
  Heavy chain CDR3 for antibody 1579 (IGHV1-58)
AAPYCSGGSCFDAFDI

SEQ ID NO: 3159 - protein, 9 aa, Homo sapiens
  Light chain CDR3 for antibody 1580 (IGKV1-39)
QQLKSYPLT

SEQ ID NO: 3160 - protein, 15 aa, Homo sapiens
  Heavy chain CDR3 for antibody 1580 (IGHV4-30-4)
ARVDVVDPAAAQFDP

SEQ ID NO: 3161 - protein, 8 aa, Homo sapiens
  Light chain CDR3 for antibody 1581 (IGKV1-39)
QQSYSMYT

SEQ ID NO: 3162 - protein, 11 aa, Homo sapiens
  Heavy chain CDR3 for antibody 1581 (IGHV3-53)
ARDRVVYGMDV

SEQ ID NO: 3163 - protein, 8 aa, Homo sapiens
  Light chain CDR3 for antibody 1582 (IGKV1-12)
QQANSFPL

SEQ ID NO: 3164 - protein, 16 aa, Homo sapiens
  Heavy chain CDR3 for antibody 1582 (IGHV3-64)
ARDSGDSPALVTWFDY

SEQ ID NO: 3165 - protein, 9 aa, Homo sapiens
  Light chain CDR3 for antibody 1583 (IGKV3-20)
QQYGSSLWT

SEQ ID NO: 3166 - protein, 12 aa, Homo sapiens
  Heavy chain CDR3 for antibody 1583 (IGHV3-53)
ARPTLSRGGMDV

SEQ ID NO: 3167 - protein, 8 aa, Homo sapiens
  Light chain CDR3 for antibody 1584 (IGKV1-39)
QQSYSTPW

SEQ ID NO: 3168 - protein, 14 aa, Homo sapiens
  Heavy chain CDR3 for antibody 1584 (IGHV1-18)
ARGGYASVTAPFDY

SEQ ID NO: 3169 - protein, 8 aa, Homo sapiens
  Light chain CDR3 for antibody 1585 (IGKV4-1)
QQYYSTPS

SEQ ID NO: 3170 - protein, 17 aa, Homo sapiens
  Heavy chain CDR3 for antibody 1585 (IGHV1-69)
ARGPPLPSSGWSEIWVY

SEQ ID NO: 3171 - protein, 9 aa, Homo sapiens
  Light chain CDR3 for antibody 1586 (IGKV1-33)
QQYDNLPRT

SEQ ID NO: 3172 - protein, 21 aa, Homo sapiens
  Heavy chain CDR3 for antibody 1586 (IGHV2-5)
AQRLGYCSSTSCYNRFVAFDI

SEQ ID NO: 3173 - protein, 9 aa, Homo sapiens
  Light chain CDR3 for antibody 1587 (IGKV1-39)
QQNLVIPRA

SEQ ID NO: 3174 - protein, 16 aa, Homo sapiens
  Heavy chain CDR3 for antibody 1587 (IGHV1-58)
AAPYCSGGSCFDAFDI

SEQ ID NO: 3175 - protein, 9 aa, Homo sapiens
  Light chain CDR3 for antibody 1588 (IGKV1-27)
QKYNSVSDT

SEQ ID NO: 3176 - protein, 11 aa, Homo sapiens
  Heavy chain CDR3 for antibody 1588 (IGHV3-53)
ARDLAVYGMDV

SEQ ID NO: 3177 - protein, 9 aa, Homo sapiens
  Light chain CDR3 for antibody 1589 (IGKV1-9)
QQLNSYPLT

SEQ ID NO: 3178 - protein, 13 aa, Homo sapiens
  Heavy chain CDR3 for antibody 1589 (IGHV5-51)
ARQLCGGDCAFDY

SEQ ID NO: 3179 - protein, 9 aa, Homo sapiens
  Light chain CDR3 for antibody 1590 (IGKV1-33)
QQYDNLPRT

SEQ ID NO: 3180 - protein, 19 aa, Homo sapiens
  Heavy chain CDR3 for antibody 1590 (IGHV1-3)
ATGLGKHDYSNYVVDYMDV

SEQ ID NO: 3181 - protein, 9 aa, Homo sapiens
  Light chain CDR3 for antibody 1591 (IGKV1-27)
QKYNSVSDT

SEQ ID NO: 3182 - protein, 13 aa, Homo sapiens
  Heavy chain CDR3 for antibody 1591 (IGHV3-23)
AKDSRGSTDYFDY

SEQ ID NO: 3183 - protein, 10 aa, Homo sapiens
  Light chain CDR3 for antibody 1592 (IGKV1-39)
QQSYVTPGLT

SEQ ID NO: 3184 - protein, 11 aa, Homo sapiens
  Heavy chain CDR3 for antibody 1592 (IGHV3-53)
ARGHWEYYFDY

SEQ ID NO: 3185 - protein, 10 aa, Homo sapiens
  Light chain CDR3 for antibody 1593 (IGKV1-5)
QQYDTYSPTT

SEQ ID NO: 3186 - protein, 13 aa, Homo sapiens
  Heavy chain CDR3 for antibody 1593 (IGHV1-69)
AVLYGDYRNAFDS

SEQ ID NO: 3187 - protein, 8 aa, Homo sapiens
  Light chain CDR3 for antibody 1594 (IGKV1-12)
QQANSFPL

SEQ ID NO: 3188 - protein, 12 aa, Homo sapiens
  Heavy chain CDR3 for antibody 1594 (IGHV3-53)
ARAPLGTDYFDS

SEQ ID NO: 3189 - protein, 9 aa, Homo sapiens
  Light chain CDR3 for antibody 1595 (IGKV1-33)
QQYDNLPRT

SEQ ID NO: 3190 - protein, 16 aa, Homo sapiens
  Heavy chain CDR3 for antibody 1595 (IGHV3-66)
AKPLFTYSYGQNYFDY

SEQ ID NO: 3191 - protein, 9 aa, Homo sapiens
  Light chain CDR3 for antibody 1596 (IGKV1-5)
QHYNIYPYT

SEQ ID NO: 3192 - protein, 15 aa, Homo sapiens
  Heavy chain CDR3 for antibody 1596 (IGHV1-69)
ARGQGPYSYYYYMDV

SEQ ID NO: 3193 - protein, 9 aa, Homo sapiens
  Light chain CDR3 for antibody 1597 (IGKV3-20)
QQYGSSPGT

SEQ ID NO: 3194 - protein, 12 aa, Homo sapiens
  Heavy chain CDR3 for antibody 1597 (IGHV3-53)
ARDLDVAGAFDI

SEQ ID NO: 3195 - protein, 9 aa, Homo sapiens
  Light chain CDR3 for antibody 1598 (IGKV1-39)
QQNLVIPRA

SEQ ID NO: 3196 - protein, 15 aa, Homo sapiens
  Heavy chain CDR3 for antibody 1598 (IGHV3-11)
ARNPAGSSLWPYMDV

SEQ ID NO: 3197 - protein, 8 aa, Homo sapiens
  Light chain CDR3 for antibody 1599 (IGKV1-12)
QQANSFPL

SEQ ID NO: 3198 - protein, 11 aa, Homo sapiens
  Heavy chain CDR3 for antibody 1599 (IGHV3-53)
ARDYGDFYFDY

SEQ ID NO: 3199 - protein, 8 aa, Homo sapiens
  Light chain CDR3 for antibody 1600 (IGKV1-5)
QQYNSYSA

SEQ ID NO: 3200 - protein, 13 aa, Homo sapiens
  Heavy chain CDR3 for antibody 1600 (IGHV5-51)
ARQLCGGDCAFDY

SEQ ID NO: 3201 - protein, 8 aa, Homo sapiens
  Light chain CDR3 for antibody 1601 (IGKV1-39)
QQSYSMYT

SEQ ID NO: 3202 - protein, 11 aa, Homo sapiens
  Heavy chain CDR3 for antibody 1601 (IGHV3-53)
ARDYGDFYFDY

SEQ ID NO: 3203 - protein, 7 aa, Homo sapiens
  Light chain CDR3 for antibody 1602 (IGKV3-20)
QQYGSSL

SEQ ID NO: 3204 - protein, 20 aa, Homo sapiens
  Heavy chain CDR3 for antibody 1602 (IGHV3-30)
AKEEGKRWLQIYYYYYGMDV

SEQ ID NO: 3205 - protein, 9 aa, Homo sapiens
  Light chain CDR3 for antibody 1603 (IGKV1-33)
QQYDNLPRT

SEQ ID NO: 3206 - protein, 9 aa, Homo sapiens
  Heavy chain CDR3 for antibody 1603 (IGHV3-53)
ARDAPENGD

SEQ ID NO: 3207 - protein, 8 aa, Homo sapiens
  Light chain CDR3 for antibody 1604 (IGKV3-15)
QQYNNWGT

SEQ ID NO: 3208 - protein, 11 aa, Homo sapiens
  Heavy chain CDR3 for antibody 1604 (IGHV3-53)
ARDIVVYGMDV

SEQ ID NO: 3209 - protein, 7 aa, Homo sapiens
  Light chain CDR3 for antibody 1605 (IGKV3-20)
QQYGSSL

SEQ ID NO: 3210 - protein, 10 aa, Homo sapiens
  Heavy chain CDR3 for antibody 1605 (IGHV5-a)
ARLNGAAMVT

SEQ ID NO: 3211 - protein, 9 aa, Homo sapiens
  Light chain CDR3 for antibody 1606 (IGKV1-39)
QQSYSTPLT

SEQ ID NO: 3212 - protein, 16 aa, Homo sapiens
  Heavy chain CDR3 for antibody 1606 (IGHV3-64)
ARDSGDSPALVTWFDY

SEQ ID NO: 3213 - protein, 9 aa, Homo sapiens
  Light chain CDR3 for antibody 1607 (IGKV3-20)
QQYGSSPRT

SEQ ID NO: 3214 - protein, 11 aa, Homo sapiens
  Heavy chain CDR3 for antibody 1607 (IGHV3-53)
ARDRVVYGMDV

SEQ ID NO: 3215 - protein, 8 aa, Homo sapiens
  Light chain CDR3 for antibody 1608 (IGKV3-15)
QQYNNWGT

SEQ ID NO: 3216 - protein, 19 aa, Homo sapiens
  Heavy chain CDR3 for antibody 1608 (IGHV1-69)
ATGLGKHDYSNYVVDYMDV

SEQ ID NO: 3217 - protein, 9 aa, Homo sapiens
  Light chain CDR3 for antibody 1609 (IGKV3-20)
QQYGSSLWT

SEQ ID NO: 3218 - protein, 13 aa, Homo sapiens
  Heavy chain CDR3 for antibody 1609 (IGHV1-3)
ARGAVTNYDYFDY

SEQ ID NO: 3219 - protein, 9 aa, Homo sapiens
  Light chain CDR3 for antibody 1610 (IGKV3-20)
QQYGSSLWT

SEQ ID NO: 3220 - protein, 11 aa, Homo sapiens
  Heavy chain CDR3 for antibody 1610 (IGHV3-21)
AREVSVTDFDY

SEQ ID NO: 3221 - protein, 8 aa, Homo sapiens
  Light chain CDR3 for antibody 1611 (IGKV3-15)
QQYNNWGT

SEQ ID NO: 3222 - protein, 17 aa, Homo sapiens
  Heavy chain CDR3 for antibody 1611 (IGHV1-69)
ARGPPLPSSGWSEIWVY

SEQ ID NO: 3223 - protein, 7 aa, Homo sapiens
  Light chain CDR3 for antibody 1612 (IGKV3-20)
QQYGSSL

SEQ ID NO: 3224 - protein, 20 aa, Homo sapiens
  Heavy chain CDR3 for antibody 1612 (IGHV3-NL1)
AKQVGEYCSGGSCYSYYFDY

SEQ ID NO: 3225 - protein, 9 aa, Homo sapiens
  Light chain CDR3 for antibody 1613 (IGKV4-1)
QQYYNFRRS

SEQ ID NO: 3226 - protein, 17 aa, Homo sapiens
  Heavy chain CDR3 for antibody 1613 (IGHV4-61)
AREKHCGGEGCLGGIDY

SEQ ID NO: 3227 - protein, 9 aa, Homo sapiens
  Light chain CDR3 for antibody 1614 (IGKV3-20)
QQYGSSLWT

SEQ ID NO: 3228 - protein, 17 aa, Homo sapiens
  Heavy chain CDR3 for antibody 1614 (IGHV1-69)
ARGPPLPSSGWSEIWVY

SEQ ID NO: 3229 - protein, 7 aa, Homo sapiens
  Light chain CDR3 for antibody 1615 (IGKV3-20)
QQYGSSL

SEQ ID NO: 3230 - protein, 12 aa, Homo sapiens
  Heavy chain CDR3 for antibody 1615 (IGHV3-53)
ARDLTAIRGFDY

SEQ ID NO: 3231 - protein, 9 aa, Homo sapiens
  Light chain CDR3 for antibody 1616 (IGKV3-20)
QQYGSSLWT

SEQ ID NO: 3232 - protein, 18 aa, Homo sapiens
  Heavy chain CDR3 for antibody 1616 (IGHV3-15)
TTDRGFRYQLLEHDAFDI

SEQ ID NO: 3233 - protein, 9 aa, Homo sapiens
  Light chain CDR3 for antibody 1617 (IGKV2D-28)
MQALQTPCT

SEQ ID NO: 3234 - protein, 11 aa, Homo sapiens
  Heavy chain CDR3 for antibody 1617 (IGHV1-18)
ARGHWEYYFDY

SEQ ID NO: 3235 - protein, 10 aa, Homo sapiens
  Light chain CDR3 for antibody 1618 (IGKV3-11)
QQRSNWPAGT

SEQ ID NO: 3236 - protein, 13 aa, Homo sapiens
  Heavy chain CDR3 for antibody 1618 (IGHV5-51)
ARQLCGGDCAFDY

SEQ ID NO: 3237 - protein, 9 aa, Homo sapiens
  Light chain CDR3 for antibody 1619 (IGKV1-39)
QQTYSTPYT

SEQ ID NO: 3238 - protein, 18 aa, Homo sapiens
  Heavy chain CDR3 for antibody 1619 (IGHV1-2)
ARDIVMIVPNNAYNWFDP

SEQ ID NO: 3239 - protein, 9 aa, Homo sapiens
  Light chain CDR3 for antibody 1620 (IGKV1-39)
QQSYSTPYT

SEQ ID NO: 3240 - protein, 14 aa, Homo sapiens
  Heavy chain CDR3 for antibody 1620 (IGHV1-69)
ARDLIAVAGGYFDY

SEQ ID NO: 3241 - protein, 8 aa, Homo sapiens
  Light chain CDR3 for antibody 1621 (IGKV1-12)
QQANSFPL

SEQ ID NO: 3242 - protein, 14 aa, Homo sapiens
  Heavy chain CDR3 for antibody 1621 (IGHV4-39)
ASGDYGDYHRGFDY

SEQ ID NO: 3243 - protein, 7 aa, Homo sapiens
  Light chain CDR3 for antibody 1622 (IGKV3-20)
QQYGSSL

SEQ ID NO: 3244 - protein, 18 aa, Homo sapiens
  Heavy chain CDR3 for antibody 1622 (IGHV3-15)
TTDRGFRYQLLEHDAFDI

SEQ ID NO: 3245 - protein, 8 aa, Homo sapiens
  Light chain CDR3 for antibody 1623 (IGKV1-12)
QQSYSTLT

SEQ ID NO: 3246 - protein, 14 aa, Homo sapiens
  Heavy chain CDR3 for antibody 1623 (IGHV4-39)
ASGDYGDYHRGFDY

SEQ ID NO: 3247 - protein, 10 aa, Homo sapiens
  Light chain CDR3 for antibody 1624 (IGKV1-33)
QQYDNLPQYN

SEQ ID NO: 3248 - protein, 12 aa, Homo sapiens
  Heavy chain CDR3 for antibody 1624 (IGHV3-53)
ARPTLSRGGMDV

SEQ ID NO: 3249 - protein, 9 aa, Homo sapiens
  Light chain CDR3 for antibody 1625 (IGKV1-5)
QQYNSYPVT

SEQ ID NO: 3250 - protein, 17 aa, Homo sapiens
  Heavy chain CDR3 for antibody 1625 (IGHV4-4)
ARGGRNSSRYPRSWFDP

SEQ ID NO: 3251 - protein, 8 aa, Homo sapiens
  Light chain CDR3 for antibody 1626 (IGKV1-12)
QQANSFPL

SEQ ID NO: 3252 - protein, 13 aa, Homo sapiens
  Heavy chain CDR3 for antibody 1626 (IGHV3-23)
AKDSRGSTDYFDY

SEQ ID NO: 3253 - protein, 9 aa, Homo sapiens
  Light chain CDR3 for antibody 1627 (IGKV1-27)
QKYNSVSDT

SEQ ID NO: 3254 - protein, 12 aa, Homo sapiens
  Heavy chain CDR3 for antibody 1627 (IGHV3-53)
ARDLFEAGGMDV

SEQ ID NO: 3255 - protein, 9 aa, Homo sapiens
  Light chain CDR3 for antibody 1628 (IGKV1-27)
QKYNSALLA

SEQ ID NO: 3256 - protein, 22 aa, Homo sapiens
  Heavy chain CDR3 for antibody 1628 (IGHV1-18)
ARTDSITIFGVVSLSDVGYFDY

SEQ ID NO: 3257 - protein, 8 aa, Homo sapiens
  Light chain CDR3 for antibody 1629 (IGKV1-39)
QQTYSTPG

SEQ ID NO: 3258 - protein, 11 aa, Homo sapiens
  Heavy chain CDR3 for antibody 1629 (IGHV3-21)
AREVSVTDFDY

SEQ ID NO: 3259 - protein, 7 aa, Homo sapiens
  Light chain CDR3 for antibody 1630 (IGKV3-20)
QQYGSSL

SEQ ID NO: 3260 - protein, 12 aa, Homo sapiens
  Heavy chain CDR3 for antibody 1630 (IGHV3-53)
ARDLSVAGAFDI

SEQ ID NO: 3261 - protein, 9 aa, Homo sapiens
  Light chain CDR3 for antibody 1631 (IGKV1-5)
QHYNIYPYT

SEQ ID NO: 3262 - protein, 12 aa, Homo sapiens
  Heavy chain CDR3 for antibody 1631 (IGHV3-53)
AREIPSGSYWDY

SEQ ID NO: 3263 - protein, 9 aa, Homo sapiens
  Light chain CDR3 for antibody 1632 (IGKV1-5)
QQYNSYSYT

SEQ ID NO: 3264 - protein, 20 aa, Homo sapiens
  Heavy chain CDR3 for antibody 1632 (IGHV3-11)
ARPQGGWFGEEVDNYYGMDV

SEQ ID NO: 3265 - protein, 9 aa, Homo sapiens
  Light chain CDR3 for antibody 1633 (IGKV1-5)
QQYKSYSQT

SEQ ID NO: 3266 - protein, 13 aa, Homo sapiens
  Heavy chain CDR3 for antibody 1633 (IGHV3-64)
ARDGYCRGGSCYH

SEQ ID NO: 3267 - protein, 9 aa, Homo sapiens
  Light chain CDR3 for antibody 1634 (IGKV1-33)
QQYDNLPQT

SEQ ID NO: 3268 - protein, 9 aa, Homo sapiens
  Heavy chain CDR3 for antibody 1634 (IGHV3-53)
ARECYCMDV

SEQ ID NO: 3269 - protein, 9 aa, Homo sapiens
  Light chain CDR3 for antibody 1635 (IGKV1-33)
QQYDNLPQT

SEQ ID NO: 3270 - protein, 12 aa, Homo sapiens
  Heavy chain CDR3 for antibody 1635 (IGHV3-53)
ARAPLGTDYFDS

SEQ ID NO: 3271 - protein, 9 aa, Homo sapiens
  Light chain CDR3 for antibody 1636 (IGKV1-9)
QQLNSDPPP

SEQ ID NO: 3272 - protein, 14 aa, Homo sapiens
  Heavy chain CDR3 for antibody 1636 (IGHV4-39)
ASGDYGDYHRGFDY

SEQ ID NO: 3273 - protein, 8 aa, Homo sapiens
  Light chain CDR3 for antibody 1637 (IGKV3-15)
QQYNNWGT

SEQ ID NO: 3274 - protein, 14 aa, Homo sapiens
  Heavy chain CDR3 for antibody 1637 (IGHV1-69)
AREVEMATLYGMDV

SEQ ID NO: 3275 - protein, 9 aa, Homo sapiens
  Light chain CDR3 for antibody 1638 (IGKV3-20)
QQYGSSLWT

SEQ ID NO: 3276 - protein, 11 aa, Homo sapiens
  Heavy chain CDR3 for antibody 1638 (IGHV5-51)
ARSPTTNTFDY

SEQ ID NO: 3277 - protein, 9 aa, Homo sapiens
  Light chain CDR3 for antibody 1639 (IGKV3-20)
QQYGSSPGT

SEQ ID NO: 3278 - protein, 18 aa, Homo sapiens
  Heavy chain CDR3 for antibody 1639 (IGHV4-34)
ARVSGWAFWTKSPHYFDY

SEQ ID NO: 3279 - protein, 10 aa, Homo sapiens
  Light chain CDR3 for antibody 1640 (IGKV1-33)
QQYDNLPRYT

SEQ ID NO: 3280 - protein, 12 aa, Homo sapiens
  Heavy chain CDR3 for antibody 1640 (IGHV3-53)
AREIPSGSYSDY

SEQ ID NO: 3281 - protein, 10 aa, Homo sapiens
  Light chain CDR3 for antibody 1641 (IGKV3D-15)
QQYSTWPAGT

SEQ ID NO: 3282 - protein, 15 aa, Homo sapiens
  Heavy chain CDR3 for antibody 1641 (IGHV4-34)
AHNLAEAGTGNWFDP

SEQ ID NO: 3283 - protein, 10 aa, Homo sapiens
  Light chain CDR3 for antibody 1642 (IGKV1-9)
QQLNSYPPVT

SEQ ID NO: 3284 - protein, 12 aa, Homo sapiens
  Heavy chain CDR3 for antibody 1642 (IGHV3-53)
ARPTLSRGGMDV

SEQ ID NO: 3285 - protein, 8 aa, Homo sapiens
  Light chain CDR3 for antibody 1643 (IGKV1-39)
QQSYSTPS

SEQ ID NO: 3286 - protein, 14 aa, Homo sapiens
  Heavy chain CDR3 for antibody 1643 (IGHV1-69)
ASEDCYSTSCGSDY

SEQ ID NO: 3287 - protein, 7 aa, Homo sapiens
  Light chain CDR3 for antibody 1644 (IGKV1-9)
QQLNSYS

SEQ ID NO: 3288 - protein, 11 aa, Homo sapiens
  Heavy chain CDR3 for antibody 1644 (IGHV3-53)
ARDRYSYGLDY

SEQ ID NO: 3289 - protein, 8 aa, Homo sapiens
  Light chain CDR3 for antibody 1645 (IGKV1-12)
QQANSFPL

SEQ ID NO: 3290 - protein, 14 aa, Homo sapiens
  Heavy chain CDR3 for antibody 1645 (IGHV3-53)
ARLFYGGNSAGVDY

SEQ ID NO: 3291 - protein, 10 aa, Homo sapiens
  Light chain CDR3 for antibody 1646 (IGKV1-39)
QQSYSTPPIT

SEQ ID NO: 3292 - protein, 13 aa, Homo sapiens
  Heavy chain CDR3 for antibody 1646 (IGHV5-51)
ARQLCGGDCAFDY

SEQ ID NO: 3293 - protein, 9 aa, Homo sapiens
  Light chain CDR3 for antibody 1647 (IGKV1-33)
QQYDNLPQT

SEQ ID NO: 3294 - protein, 14 aa, Homo sapiens
  Heavy chain CDR3 for antibody 1647 (IGHV1-69)
ARYGVSYGDYLPDY

SEQ ID NO: 3295 - protein, 10 aa, Homo sapiens
  Light chain CDR3 for antibody 1648 (IGKV1-9)
QQLNSYPGYT

SEQ ID NO: 3296 - protein, 13 aa, Homo sapiens
  Heavy chain CDR3 for antibody 1648 (IGHV1-69)
ARDGYCRGGSCYH

SEQ ID NO: 3297 - protein, 10 aa, Homo sapiens
  Light chain CDR3 for antibody 1649 (IGKV3-11)
QQRSNWPAGT

SEQ ID NO: 3298 - protein, 11 aa, Homo sapiens
  Heavy chain CDR3 for antibody 1649 (IGHV3-53)
ARAYGDYYFDY

SEQ ID NO: 3299 - protein, 7 aa, Homo sapiens
  Light chain CDR3 for antibody 1650 (IGKV1-9)
QQLNSYS

SEQ ID NO: 3300 - protein, 16 aa, Homo sapiens
  Heavy chain CDR3 for antibody 1650 (IGHV1-58)
AAPYCSGGSCFDAFDI

SEQ ID NO: 3301 - protein, 10 aa, Homo sapiens
  Light chain CDR3 for antibody 1651 (IGKV1-9)
QQLNSYPPYT

SEQ ID NO: 3302 - protein, 13 aa, Homo sapiens
  Heavy chain CDR3 for antibody 1651 (IGHV5-51)
ARQLCGGDCAFDY

SEQ ID NO: 3303 - protein, 9 aa, Homo sapiens
  Light chain CDR3 for antibody 1652 (IGKV1-39)
QQSYSTPLT

SEQ ID NO: 3304 - protein, 19 aa, Homo sapiens
  Heavy chain CDR3 for antibody 1652 (IGHV1-69)
ARGVRYCSGGSCYGAHFQH

SEQ ID NO: 3305 - protein, 9 aa, Homo sapiens
  Light chain CDR3 for antibody 1653 (IGKV1-9)
QQYNSYPLT

SEQ ID NO: 3306 - protein, 11 aa, Homo sapiens
  Heavy chain CDR3 for antibody 1653 (IGHV3-53)
ARDRGSGWYDY

SEQ ID NO: 3307 - protein, 8 aa, Homo sapiens
  Light chain CDR3 for antibody 1654 (IGKV1-39)
QQSYSTPS

SEQ ID NO: 3308 - protein, 11 aa, Homo sapiens
  Heavy chain CDR3 for antibody 1654 (IGHV1-69)
ARDRGSGWYDY

SEQ ID NO: 3309 - protein, 9 aa, Homo sapiens
  Light chain CDR3 for antibody 1655 (IGKV1-12)
QQANSFPPT

SEQ ID NO: 3310 - protein, 21 aa, Homo sapiens
  Heavy chain CDR3 for antibody 1655 (IGHV2-5)
AERRGYCSSTSCYNRFGAFDI

SEQ ID NO: 3311 - protein, 9 aa, Homo sapiens
  Light chain CDR3 for antibody 1656 (IGKV1-33)
QQYDNLPQT

SEQ ID NO: 3312 - protein, 15 aa, Homo sapiens
  Heavy chain CDR3 for antibody 1656 (IGHV3-13)
ARDRGGYYTGYAFDI

SEQ ID NO: 3313 - protein, 10 aa, Homo sapiens
  Light chain CDR3 for antibody 1657 (IGKV1-33)
QQYDNLPQYN

SEQ ID NO: 3314 - protein, 14 aa, Homo sapiens
  Heavy chain CDR3 for antibody 1657 (IGHV4-39)
ASGDYGDYHRGFDY

SEQ ID NO: 3315 - protein, 9 aa, Homo sapiens
  Light chain CDR3 for antibody 1658 (IGKV1-27)
QKYNSVSDT

SEQ ID NO: 3316 - protein, 9 aa, Homo sapiens
  Heavy chain CDR3 for antibody 1658 (IGHV3-53)
ARDAPENGD

SEQ ID NO: 3317 - protein, 9 aa, Homo sapiens
  Light chain CDR3 for antibody 1659 (IGKV1-5)
QQYNSYPLT

SEQ ID NO: 3318 - protein, 9 aa, Homo sapiens
  Heavy chain CDR3 for antibody 1659 (IGHV1-69)
ARDAPENGD

SEQ ID NO: 3319 - protein, 7 aa, Homo sapiens
  Light chain CDR3 for antibody 1660 (IGKV1-9)
QQLNSYS

SEQ ID NO: 3320 - protein, 9 aa, Homo sapiens
  Heavy chain CDR3 for antibody 1660 (IGHV3-53)
ARDAPESGD

SEQ ID NO: 3321 - protein, 9 aa, Homo sapiens
  Light chain CDR3 for antibody 1661 (IGKV1-39)
QQSYSTPQT

SEQ ID NO: 3322 - protein, 11 aa, Homo sapiens
  Heavy chain CDR3 for antibody 1661 (IGHV3-53)
ARDIVVYGMDV

SEQ ID NO: 3323 - protein, 9 aa, Homo sapiens
  Light chain CDR3 for antibody 1662 (IGKV1-9)
QQLNSYPLT

SEQ ID NO: 3324 - protein, 11 aa, Homo sapiens
  Heavy chain CDR3 for antibody 1662 (IGHV3-21)
AREVSVTDFDY

SEQ ID NO: 3325 - protein, 9 aa, Homo sapiens
  Light chain CDR3 for antibody 1663 (IGKV1-27)
QKYNSVSDT

SEQ ID NO: 3326 - protein, 14 aa, Homo sapiens
  Heavy chain CDR3 for antibody 1663 (IGHV3-53)
ARLFYGGNSAGVDY

SEQ ID NO: 3327 - protein, 10 aa, Homo sapiens
  Light chain CDR3 for antibody 1664 (IGKV1-39)
QQSYNTRALT

SEQ ID NO: 3328 - protein, 19 aa, Homo sapiens
  Heavy chain CDR3 for antibody 1664 (IGHV1-3)
ATGLGKHDYSNYVVDYMDV

SEQ ID NO: 3329 - protein, 10 aa, Homo sapiens
  Light chain CDR3 for antibody 1665 (IGKV3-11)
QQRSNWPAGT

SEQ ID NO: 3330 - protein, 12 aa, Homo sapiens
  Heavy chain CDR3 for antibody 1665 (IGHV3-53)
ARPTLSRGGMDV

SEQ ID NO: 3331 - protein, 10 aa, Homo sapiens
  Light chain CDR3 for antibody 1666 (IGKV1-39)
QQSYSTPPLT

SEQ ID NO: 3332 - protein, 11 aa, Homo sapiens
  Heavy chain CDR3 for antibody 1666 (IGHV3-13)
ARDLDYYGMDV

SEQ ID NO: 3333 - protein, 9 aa, Homo sapiens
  Light chain CDR3 for antibody 1667 (IGKV3-20)
QQYGSSPRT

SEQ ID NO: 3334 - protein, 12 aa, Homo sapiens
  Heavy chain CDR3 for antibody 1667 (IGHV3-53)
ARAPLGTDYFDS

SEQ ID NO: 3335 - protein, 9 aa, Homo sapiens
  Light chain CDR3 for antibody 1668 (IGKV3-20)
QQYGSSPWT

SEQ ID NO: 3336 - protein, 16 aa, Homo sapiens
  Heavy chain CDR3 for antibody 1668 (IGHV1-58)
AAPYCSSTSCHDAFDI

SEQ ID NO: 3337 - protein, 9 aa, Homo sapiens
  Light chain CDR3 for antibody 1669 (IGKV1-9)
QQLNSDPPP

SEQ ID NO: 3338 - protein, 11 aa, Homo sapiens
  Heavy chain CDR3 for antibody 1669 (IGHV3-53)
ARDLDYYGMDV

SEQ ID NO: 3339 - protein, 10 aa, Homo sapiens
  Light chain CDR3 for antibody 1670 (IGKV1-12)
QQSYSNGSGT

SEQ ID NO: 3340 - protein, 13 aa, Homo sapiens
  Heavy chain CDR3 for antibody 1670 (IGHV5-51)
ARQLCGGDCAFDY

SEQ ID NO: 3341 - protein, 9 aa, Homo sapiens
  Light chain CDR3 for antibody 1671 (IGKV1-9)
QQLNSYPPI

SEQ ID NO: 3342 - protein, 13 aa, Homo sapiens
  Heavy chain CDR3 for antibody 1671 (IGHV3-53)
ARDGYCRGGSFYH

SEQ ID NO: 3343 - protein, 7 aa, Homo sapiens
  Light chain CDR3 for antibody 1672 (IGKV3-20)
QQYGSSL

SEQ ID NO: 3344 - protein, 17 aa, Homo sapiens
  Heavy chain CDR3 for antibody 1672 (IGHV5-51)
ARRQGRWYRGMFHYMDV

SEQ ID NO: 3345 - protein, 8 aa, Homo sapiens
  Light chain CDR3 for antibody 1673 (IGKV1-12)
QQANSFPL

SEQ ID NO: 3346 - protein, 11 aa, Homo sapiens
  Heavy chain CDR3 for antibody 1673 (IGHV3-53)
ARDLDYYGMDV

SEQ ID NO: 3347 - protein, 9 aa, Homo sapiens
  Light chain CDR3 for antibody 1674 (IGKV1-39)
QQSYSTPLT

SEQ ID NO: 3348 - protein, 13 aa, Homo sapiens
  Heavy chain CDR3 for antibody 1674 (IGHV3-53)
ARDGYCRGGSCNH

SEQ ID NO: 3349 - protein, 9 aa, Homo sapiens
  Light chain CDR3 for antibody 1675 (IGKV3-20)
QQYGSSPLT

SEQ ID NO: 3350 - protein, 19 aa, Homo sapiens
  Heavy chain CDR3 for antibody 1675 (IGHV4-31)
ARVVGHTIFGVVIIQNFDY

SEQ ID NO: 3351 - protein, 7 aa, Homo sapiens
  Light chain CDR3 for antibody 1676 (IGKV3-20)
QQYGSSL

SEQ ID NO: 3352 - protein, 11 aa, Homo sapiens
  Heavy chain CDR3 for antibody 1676 (IGHV3-53)
ARDQGNDAFDI

SEQ ID NO: 3353 - protein, 9 aa, Homo sapiens
  Light chain CDR3 for antibody 1677 (IGKV1-5)
QHYNIYPYT

SEQ ID NO: 3354 - protein, 12 aa, Homo sapiens
  Heavy chain CDR3 for antibody 1677 (IGHV3-53)
ARDLFEAGGMDV

SEQ ID NO: 3355 - protein, 9 aa, Homo sapiens
  Light chain CDR3 for antibody 1678 (IGKV1-16)
QQYNTYPHT

SEQ ID NO: 3356 - protein, 15 aa, Homo sapiens
  Heavy chain CDR3 for antibody 1678 (IGHV3-30)
AKDRGVYNWNDGMDY

SEQ ID NO: 3357 - protein, 8 aa, Homo sapiens
  Light chain CDR3 for antibody 1679 (IGKV1-12)
QQANSFPL

SEQ ID NO: 3358 - protein, 19 aa, Homo sapiens
  Heavy chain CDR3 for antibody 1679 (IGHV1-3)
ATGLGKHDYSNYVVDYMDV

SEQ ID NO: 3359 - protein, 10 aa, Homo sapiens
  Light chain CDR3 for antibody 1680 (IGKV1-39)
QQSYSNGSGT

SEQ ID NO: 3360 - protein, 16 aa, Homo sapiens
  Heavy chain CDR3 for antibody 1680 (IGHV1-58)
AAPYCSGGSCFDAFDI

SEQ ID NO: 3361 - protein, 10 aa, Homo sapiens
  Light chain CDR3 for antibody 1681 (IGKV1-9)
QQLNSYPRYT

SEQ ID NO: 3362 - protein, 20 aa, Homo sapiens
  Heavy chain CDR3 for antibody 1681 (IGHV3-11)
ASIKRDRIMITFGDYYYMDV

SEQ ID NO: 3363 - protein, 8 aa, Homo sapiens
  Light chain CDR3 for antibody 1682 (IGKV1-5)
QQYNSYSA

SEQ ID NO: 3364 - protein, 17 aa, Homo sapiens
  Heavy chain CDR3 for antibody 1682 (IGHV1-69)
ARGPARPSSGWSESWVY

SEQ ID NO: 3365 - protein, 6 aa, Homo sapiens
  Light chain CDR3 for antibody 1683 (IGKV1-5)
QQYNSY

SEQ ID NO: 3366 - protein, 13 aa, Homo sapiens
  Heavy chain CDR3 for antibody 1683 (IGHV5-51)
ARQLCGGDCAFDY

SEQ ID NO: 3367 - protein, 9 aa, Homo sapiens
  Light chain CDR3 for antibody 1684 (IGKV1-33)
QQYDNLPQT

SEQ ID NO: 3368 - protein, 20 aa, Homo sapiens
  Heavy chain CDR3 for antibody 1684 (IGHV3-30)
AKEEGKRWLQIYYYYYGMDV

SEQ ID NO: 3369 - protein, 9 aa, Homo sapiens
  Light chain CDR3 for antibody 1685 (IGKV1-39)
QQSYSTPRT

SEQ ID NO: 3370 - protein, 17 aa, Homo sapiens
  Heavy chain CDR3 for antibody 1685 (IGHV1-2)
ARVPLSHITVTPYGMDV

SEQ ID NO: 3371 - protein, 9 aa, Homo sapiens
  Light chain CDR3 for antibody 1686 (IGKV1-17)
LQHHSYPWT

SEQ ID NO: 3372 - protein, 15 aa, Homo sapiens
  Heavy chain CDR3 for antibody 1686 (IGHV1-18)
ARDVNSKVSYFYMDV

SEQ ID NO: 3373 - protein, 9 aa, Homo sapiens
  Light chain CDR3 for antibody 1687 (IGKV1-33)
QQYDNLPQT

SEQ ID NO: 3374 - protein, 11 aa, Homo sapiens
  Heavy chain CDR3 for antibody 1687 (IGHV3-53)
ARDQGNDAFDI

SEQ ID NO: 3375 - protein, 9 aa, Homo sapiens
  Light chain CDR3 for antibody 1688 (IGKV1-27)
QKYNSVSDT

SEQ ID NO: 3376 - protein, 18 aa, Homo sapiens
  Heavy chain CDR3 for antibody 1688 (IGHV3-11)
ARSYCGGDCYPESRIFDY

SEQ ID NO: 3377 - protein, 10 aa, Homo sapiens
  Light chain CDR3 for antibody 1689 (IGKV1-39)
QQSYSNGSGT

SEQ ID NO: 3378 - protein, 12 aa, Homo sapiens
  Heavy chain CDR3 for antibody 1689 (IGHV3-53)
ARPTLSRGGMDV

SEQ ID NO: 3379 - protein, 9 aa, Homo sapiens
  Light chain CDR3 for antibody 1690 (IGKV1-39)
QQSYSTPQT

SEQ ID NO: 3380 - protein, 12 aa, Homo sapiens
  Heavy chain CDR3 for antibody 1690 (IGHV3-53)
ARPTLSRGGMDV

SEQ ID NO: 3381 - protein, 8 aa, Homo sapiens
  Light chain CDR3 for antibody 1691 (IGKV1-5)
QQYNSYSA

SEQ ID NO: 3382 - protein, 19 aa, Homo sapiens
  Heavy chain CDR3 for antibody 1691 (IGHV1-3)
ATGLGKHDYSNYVVDYMDV

SEQ ID NO: 3383 - protein, 9 aa, Homo sapiens
  Light chain CDR3 for antibody 1692 (IGKV1-27)
QKYNSVSDT

SEQ ID NO: 3384 - protein, 13 aa, Homo sapiens
  Heavy chain CDR3 for antibody 1692 (IGHV5-51)
ARQLCGGDCAFDY

SEQ ID NO: 3385 - protein, 9 aa, Homo sapiens
  Light chain CDR3 for antibody 1693 (IGKV1-5)
QQSYSTPQT

SEQ ID NO: 3386 - protein, 15 aa, Homo sapiens
  Heavy chain CDR3 for antibody 1693 (IGHV1-69)
ARGQGPYSYYYYMDV

SEQ ID NO: 3387 - protein, 9 aa, Homo sapiens
  Light chain CDR3 for antibody 1694 (IGKV1-5)
QQYNSYWWT

SEQ ID NO: 3388 - protein, 12 aa, Homo sapiens
  Heavy chain CDR3 for antibody 1694 (IGHV1-24)
APTGTVGATTVT

SEQ ID NO: 3389 - protein, 9 aa, Homo sapiens
  Light chain CDR3 for antibody 1695 (IGKV1-9)
QQLNSYPLT

SEQ ID NO: 3390 - protein, 11 aa, Homo sapiens
  Heavy chain CDR3 for antibody 1695 (IGHV3-53)
ARDLDYYGMDV

SEQ ID NO: 3391 - protein, 9 aa, Homo sapiens
  Light chain CDR3 for antibody 1696 (IGKV1-39)
QQSYSTPYT

SEQ ID NO: 3392 - protein, 11 aa, Homo sapiens
  Heavy chain CDR3 for antibody 1696 (IGHV3-53)
ARDRYSYGLDY

SEQ ID NO: 3393 - protein, 9 aa, Homo sapiens
  Light chain CDR3 for antibody 1697 (IGKV1-5)
QHYNIYPYT

SEQ ID NO: 3394 - protein, 16 aa, Homo sapiens
  Heavy chain CDR3 for antibody 1697 (IGHV3-30)
AKPLFTYSYGQNYFDY

SEQ ID NO: 3395 - protein, 9 aa, Homo sapiens
  Light chain CDR3 for antibody 1698 (IGKV3-20)
QQYGSSLWT

SEQ ID NO: 3396 - protein, 19 aa, Homo sapiens
  Heavy chain CDR3 for antibody 1698 (IGHV1-69)
ARGVRYCSGGSCYGAHFQH

SEQ ID NO: 3397 - protein, 7 aa, Homo sapiens
  Light chain CDR3 for antibody 1699 (IGKV3-20)
QQYGSSL

SEQ ID NO: 3398 - protein, 17 aa, Homo sapiens
  Heavy chain CDR3 for antibody 1699 (IGHV3-9)
AKDHRYDYSNYGCYFDY

SEQ ID NO: 3399 - protein, 7 aa, Homo sapiens
  Light chain CDR3 for antibody 1700 (IGKV3-20)
QQYGSSL

SEQ ID NO: 3400 - protein, 18 aa, Homo sapiens
  Heavy chain CDR3 for antibody 1700 (IGHV1-18)
ARDLVGYCSGGSCHSGDY

SEQ ID NO: 3401 - protein, 8 aa, Homo sapiens
  Light chain CDR3 for antibody 1701 (IGKV1-12)
QQANSFPL

SEQ ID NO: 3402 - protein, 20 aa, Homo sapiens
  Heavy chain CDR3 for antibody 1701 (IGHV3-66)
AKQVGEYCSGGSCYSYYFDY

SEQ ID NO: 3403 - protein, 6 aa, Homo sapiens
  Light chain CDR3 for antibody 1702 (IGKV1-5)
QQYNSY

SEQ ID NO: 3404 - protein, 16 aa, Homo sapiens
  Heavy chain CDR3 for antibody 1702 (IGHV1-58)
AAPYCSGGSCFDAFDI

SEQ ID NO: 3405 - protein, 9 aa, Homo sapiens
  Light chain CDR3 for antibody 1703 (IGKV1-5)
QQYNGYSLT

SEQ ID NO: 3406 - protein, 16 aa, Homo sapiens
  Heavy chain CDR3 for antibody 1703 (IGHV1-2)
ARASEVTNYYSHGMDV

SEQ ID NO: 3407 - protein, 8 aa, Homo sapiens
  Light chain CDR3 for antibody 1704 (IGKV1-12)
QQANSFPL

SEQ ID NO: 3408 - protein, 18 aa, Homo sapiens
  Heavy chain CDR3 for antibody 1704 (IGHV3-15)
TTDRGFRYQLLEHDAFDI

SEQ ID NO: 3409 - protein, 9 aa, Homo sapiens
  Light chain CDR3 for antibody 1705 (IGKV1-9)
QQYNSYPLT

SEQ ID NO: 3410 - protein, 13 aa, Homo sapiens
  Heavy chain CDR3 for antibody 1705 (IGHV3-23)
AKDSRGSTDYFDY

SEQ ID NO: 3411 - protein, 9 aa, Homo sapiens
  Light chain CDR3 for antibody 1706 (IGKV1-39)
QQNLVIPRA

SEQ ID NO: 3412 - protein, 15 aa, Homo sapiens
  Heavy chain CDR3 for antibody 1706 (IGHV1-69)
ARVSVYDSSGYYHDY

SEQ ID NO: 3413 - protein, 9 aa, Homo sapiens
  Light chain CDR3 for antibody 1707 (IGKV1-5)
QQYNSYPWT

SEQ ID NO: 3414 - protein, 19 aa, Homo sapiens
  Heavy chain CDR3 for antibody 1707 (IGHV1-69)
ARGVRYCSGGSCYGAHFYH

SEQ ID NO: 3415 - protein, 8 aa, Homo sapiens
  Light chain CDR3 for antibody 1708 (IGKV1-12)
QQANSFPL

SEQ ID NO: 3416 - protein, 11 aa, Homo sapiens
  Heavy chain CDR3 for antibody 1708 (IGHV3-53)
ARDLGSSGSDY

SEQ ID NO: 3417 - protein, 7 aa, Homo sapiens
  Light chain CDR3 for antibody 1709 (IGKV1-9)
QQLNSYS

SEQ ID NO: 3418 - protein, 14 aa, Homo sapiens
  Heavy chain CDR3 for antibody 1709 (IGHV3-53)
ARLFYGGNSAGVDY

SEQ ID NO: 3419 - protein, 10 aa, Homo sapiens
  Light chain CDR3 for antibody 1710 (IGKV3-20)
QQYGSSPPWT

SEQ ID NO: 3420 - protein, 16 aa, Homo sapiens
  Heavy chain CDR3 for antibody 1710 (IGHV1-69)
AAPYCSGGSCFDAFDI

SEQ ID NO: 3421 - protein, 9 aa, Homo sapiens
  Light chain CDR3 for antibody 1711 (IGKV3-15)
QQYNNWPRT

SEQ ID NO: 3422 - protein, 15 aa, Homo sapiens
  Heavy chain CDR3 for antibody 1711 (IGHV4-61)
ARDIFEGYGDFASEY

SEQ ID NO: 3423 - protein, 8 aa, Homo sapiens
  Light chain CDR3 for antibody 1712 (IGKV4-1)
QQYYSTPS

SEQ ID NO: 3424 - protein, 19 aa, Homo sapiens
  Heavy chain CDR3 for antibody 1712 (IGHV1-3)
ATGLGKHDYSNYVVDYMDV

SEQ ID NO: 3425 - protein, 9 aa, Homo sapiens
  Light chain CDR3 for antibody 1713 (IGKV1-33)
QQYDNLPIT

SEQ ID NO: 3426 - protein, 12 aa, Homo sapiens
  Heavy chain CDR3 for antibody 1713 (IGHV3-15)
TTDSRTLYALDV

SEQ ID NO: 3427 - protein, 10 aa, Homo sapiens
  Light chain CDR3 for antibody 1714 (IGKV1-39)
QQSYNTRALT

SEQ ID NO: 3428 - protein, 15 aa, Homo sapiens
  Heavy chain CDR3 for antibody 1714 (IGHV1-69)
ARGQGPYSYYYYMDV

SEQ ID NO: 3429 - protein, 8 aa, Homo sapiens
  Light chain CDR3 for antibody 1715 (IGKV1-39)
QQYYSTPS

SEQ ID NO: 3430 - protein, 11 aa, Homo sapiens
  Heavy chain CDR3 for antibody 1715 (IGHV3-53)
ARDRYSYGLDY

SEQ ID NO: 3431 - protein, 9 aa, Homo sapiens
  Light chain CDR3 for antibody 1716 (IGKV1-39)
QQSYSTPLT

SEQ ID NO: 3432 - protein, 11 aa, Homo sapiens
  Heavy chain CDR3 for antibody 1716 (IGHV3-53)
ARDRGSGWYDY

SEQ ID NO: 3433 - protein, 7 aa, Homo sapiens
  Light chain CDR3 for antibody 1717 (IGKV3-20)
QQYGSSL

SEQ ID NO: 3434 - protein, 12 aa, Homo sapiens
  Heavy chain CDR3 for antibody 1717 (IGHV4-34)
ARGLWSLWYFDL

SEQ ID NO: 3435 - protein, 9 aa, Homo sapiens
  Light chain CDR3 for antibody 1718 (IGKV1-5)
QHYNIYPYT

SEQ ID NO: 3436 - protein, 16 aa, Homo sapiens
  Heavy chain CDR3 for antibody 1718 (IGHV3-64)
ARDSGDSPALVTWFDY

SEQ ID NO: 3437 - protein, 9 aa, Homo sapiens
  Light chain CDR3 for antibody 1719 (IGKV3-20)
QQYGSSPRT

SEQ ID NO: 3438 - protein, 12 aa, Homo sapiens
  Heavy chain CDR3 for antibody 1719 (IGHV3-53)
ARDLFEAGGMDV

SEQ ID NO: 3439 - protein, 10 aa, Homo sapiens
  Light chain CDR3 for antibody 1720 (IGKV1-39)
QQSYSTPPIT

SEQ ID NO: 3440 - protein, 20 aa, Homo sapiens
  Heavy chain CDR3 for antibody 1720 (IGHV3-30)
AKEEGKRWIQIYYYYYGMDV

SEQ ID NO: 3441 - protein, 8 aa, Homo sapiens
  Light chain CDR3 for antibody 1721 (IGKV1-39)
QQYNSYSA

SEQ ID NO: 3442 - protein, 16 aa, Homo sapiens
  Heavy chain CDR3 for antibody 1721 (IGHV3-64)
ARDSGDSPALVTWFDY

SEQ ID NO: 3443 - protein, 9 aa, Homo sapiens
  Light chain CDR3 for antibody 1722 (IGKV1-27)
QKYNSVSDT

SEQ ID NO: 3444 - protein, 15 aa, Homo sapiens
  Heavy chain CDR3 for antibody 1722 (IGHV1-69)
ARGQGPYSYYYYMDV

SEQ ID NO: 3445 - protein, 10 aa, Homo sapiens
  Light chain CDR3 for antibody 1723 (IGKV3-11)
QQRSNWPAGT

SEQ ID NO: 3446 - protein, 13 aa, Homo sapiens
  Heavy chain CDR3 for antibody 1723 (IGHV3-53)
ARDGYCRGGSCYH

SEQ ID NO: 3447 - protein, 8 aa, Homo sapiens
  Light chain CDR3 for antibody 1724 (IGKV1-12)
QQANSFPL

SEQ ID NO: 3448 - protein, 14 aa, Homo sapiens
  Heavy chain CDR3 for antibody 1724 (IGHV1-69)
AREVEMATLYGMDV

SEQ ID NO: 3449 - protein, 9 aa, Homo sapiens
  Light chain CDR3 for antibody 1725 (IGKV1-5)
QQYNSYPRT

SEQ ID NO: 3450 - protein, 17 aa, Homo sapiens
  Heavy chain CDR3 for antibody 1725 (IGHV1-69)
ARGPPLPSSGWSEIWVY

SEQ ID NO: 3451 - protein, 9 aa, Homo sapiens
  Light chain CDR3 for antibody 1726 (IGKV1-5)
QQYNSYSRT

SEQ ID NO: 3452 - protein, 11 aa, Homo sapiens
  Heavy chain CDR3 for antibody 1726 (IGHV5-51)
ARSPTTSTFDY

SEQ ID NO: 3453 - protein, 9 aa, Homo sapiens
  Light chain CDR3 for antibody 1727 (IGKV1-39)
QQNLVIPRA

SEQ ID NO: 3454 - protein, 12 aa, Homo sapiens
  Heavy chain CDR3 for antibody 1727 (IGHV3-53)
ARPTLARGGMDV

SEQ ID NO: 3455 - protein, 9 aa, Homo sapiens
  Light chain CDR3 for antibody 1728 (IGKV1-39)
QQSYSLSWT

SEQ ID NO: 3456 - protein, 13 aa, Homo sapiens
  Heavy chain CDR3 for antibody 1728 (IGHV3-15)
VTDGDSEKNWFDP

SEQ ID NO: 3457 - protein, 7 aa, Homo sapiens
  Light chain CDR3 for antibody 1729 (IGKV1-9)
QQLNSYS

SEQ ID NO: 3458 - protein, 12 aa, Homo sapiens
  Heavy chain CDR3 for antibody 1729 (IGHV3-53)
ARPTLSRGGMDV

SEQ ID NO: 3459 - protein, 9 aa, Homo sapiens
  Light chain CDR3 for antibody 1730 (IGKV1-39)
QQSYSTPRT

SEQ ID NO: 3460 - protein, 19 aa, Homo sapiens
  Heavy chain CDR3 for antibody 1730 (IGHV4-34)
ARGGRGWLQLGPPNYYFDY

SEQ ID NO: 3461 - protein, 9 aa, Homo sapiens
  Light chain CDR3 for antibody 1731 (IGKV2D-28)
MQALQTLYT

SEQ ID NO: 3462 - protein, 13 aa, Homo sapiens
  Heavy chain CDR3 for antibody 1731 (IGHV1-69)
ARQEFQEGYGMDV

SEQ ID NO: 3463 - protein, 9 aa, Homo sapiens
  Light chain CDR3 for antibody 1732 (IGKV1-16)
QQYYGYPRT

SEQ ID NO: 3464 - protein, 11 aa, Homo sapiens
  Heavy chain CDR3 for antibody 1732 (IGHV4-30-2)
RHGGGYRDIDF

SEQ ID NO: 3465 - protein, 8 aa, Homo sapiens
  Light chain CDR3 for antibody 1733 (IGKV1-5)
QQYNSYSA

SEQ ID NO: 3466 - protein, 17 aa, Homo sapiens
  Heavy chain CDR3 for antibody 1733 (IGHV1-69)
ARGPALPSSGWSEILDY

SEQ ID NO: 3467 - protein, 10 aa, Homo sapiens
  Light chain CDR3 for antibody 1734 (IGKV1-9)
QQLNSYPPYT

SEQ ID NO: 3468 - protein, 12 aa, Homo sapiens
  Heavy chain CDR3 for antibody 1734 (IGHV3-53)
ARDLFEAGGMDV

SEQ ID NO: 3469 - protein, 9 aa, Homo sapiens
  Light chain CDR3 for antibody 1735 (IGKV3-20)
QQYGSSLWT

SEQ ID NO: 3470 - protein, 13 aa, Homo sapiens
  Heavy chain CDR3 for antibody 1735 (IGHV3-64)
ARDADRAVPIFDY

SEQ ID NO: 3471 - protein, 8 aa, Homo sapiens
  Light chain CDR3 for antibody 1736 (IGKV1-9)
QQLNSYPF

SEQ ID NO: 3472 - protein, 11 aa, Homo sapiens
  Heavy chain CDR3 for antibody 1736 (IGHV3-53)
ARDIVVYGMDV

SEQ ID NO: 3473 - protein, 10 aa, Homo sapiens
  Light chain CDR3 for antibody 1737 (IGKV1-39)
QQSYSNGSGT

SEQ ID NO: 3474 - protein, 13 aa, Homo sapiens
  Heavy chain CDR3 for antibody 1737 (IGHV3-23)
AKDSRGSTDYFDY

SEQ ID NO: 3475 - protein, 8 aa, Homo sapiens
  Light chain CDR3 for antibody 1738 (IGKV1-12)
QQANSFPL

SEQ ID NO: 3476 - protein, 17 aa, Homo sapiens
  Heavy chain CDR3 for antibody 1738 (IGHV1-69)
ARGPPLPSSGWSEIWDY

SEQ ID NO: 3477 - protein, 9 aa, Homo sapiens
  Light chain CDR3 for antibody 1739 (IGKV1-27)
QKYNSVSDT

SEQ ID NO: 3478 - protein, 16 aa, Homo sapiens
  Heavy chain CDR3 for antibody 1739 (IGHV3-30)
ARDSGDSPALVTWFDY

SEQ ID NO: 3479 - protein, 10 aa, Homo sapiens
  Light chain CDR3 for antibody 1740 (IGKV1-39)
QQSYSTPPIT

SEQ ID NO: 3480 - protein, 11 aa, Homo sapiens
  Heavy chain CDR3 for antibody 1740 (IGHV3-53)
ARDRYSYGLDY

SEQ ID NO: 3481 - protein, 8 aa, Homo sapiens
  Light chain CDR3 for antibody 1741 (IGKV1-12)
QQANSFPL

SEQ ID NO: 3482 - protein, 17 aa, Homo sapiens
  Heavy chain CDR3 for antibody 1741 (IGHV5-51)
ARRQGRWYRGMFHYMDV

SEQ ID NO: 3483 - protein, 9 aa, Homo sapiens
  Light chain CDR3 for antibody 1742 (IGKV1-5)
QQYNSYPWT

SEQ ID NO: 3484 - protein, 13 aa, Homo sapiens
  Heavy chain CDR3 for antibody 1742 (IGHV3-53)
ARDGYCRGGSCYH

SEQ ID NO: 3485 - protein, 8 aa, Homo sapiens
  Light chain CDR3 for antibody 1743 (IGKV1-12)
QQANSFPL

SEQ ID NO: 3486 - protein, 12 aa, Homo sapiens
  Heavy chain CDR3 for antibody 1743 (IGHV3-53)
ARDLFEAGGMDV

SEQ ID NO: 3487 - protein, 9 aa, Homo sapiens
  Light chain CDR3 for antibody 1744 (IGKV1-9)
QQLNSDPPP

SEQ ID NO: 3488 - protein, 17 aa, Homo sapiens
  Heavy chain CDR3 for antibody 1744 (IGHV1-69)
ARGPPLPSSGWSEIWVY

SEQ ID NO: 3489 - protein, 7 aa, Homo sapiens
  Light chain CDR3 for antibody 1745 (IGKV3-20)
QQYGSSL

SEQ ID NO: 3490 - protein, 11 aa, Homo sapiens
  Heavy chain CDR3 for antibody 1745 (IGHV3-53)
GRGRWECYFDY

SEQ ID NO: 3491 - protein, 8 aa, Homo sapiens
  Light chain CDR3 for antibody 1746 (IGKV1-9)
QQLNSYPF

SEQ ID NO: 3492 - protein, 11 aa, Homo sapiens
  Heavy chain CDR3 for antibody 1746 (IGHV3-53)
ARGHWEYYFDY

SEQ ID NO: 3493 - protein, 9 aa, Homo sapiens
  Light chain CDR3 for antibody 1747 (IGKV2D-28)
MQALQTPCT

SEQ ID NO: 3494 - protein, 19 aa, Homo sapiens
  Heavy chain CDR3 for antibody 1747 (IGHV1-69)
AEGRALTLSYSSSYGAFDY

SEQ ID NO: 3495 - protein, 9 aa, Homo sapiens
  Light chain CDR3 for antibody 1748 (IGKV1-9)
QQLNSYPPL

SEQ ID NO: 3496 - protein, 11 aa, Homo sapiens
  Heavy chain CDR3 for antibody 1748 (IGHV3-53)
ARDLGPRGIDY

SEQ ID NO: 3497 - protein, 9 aa, Homo sapiens
  Light chain CDR3 for antibody 1749 (IGKV1-39)
QQSDSTPRT

SEQ ID NO: 3498 - protein, 18 aa, Homo sapiens
  Heavy chain CDR3 for antibody 1749 (IGHV1-18)
ARDSGYGGYDYWEPPLDY

SEQ ID NO: 3499 - protein, 9 aa, Homo sapiens
  Light chain CDR3 for antibody 1750 (IGKV1-39)
QQSYSTPRT

SEQ ID NO: 3500 - protein, 14 aa, Homo sapiens
  Heavy chain CDR3 for antibody 1750 (IGHV2-70)
ARTPIAAAGSPFDP

SEQ ID NO: 3501 - protein, 10 aa, Homo sapiens
  Light chain CDR3 for antibody 1751 (IGKV3-11)
QQRSIWLGYT

SEQ ID NO: 3502 - protein, 15 aa, Homo sapiens
  Heavy chain CDR3 for antibody 1751 (IGHV1-46)
ARDSEVVPAARYFQH

SEQ ID NO: 3503 - protein, 9 aa, Homo sapiens
  Light chain CDR3 for antibody 1752 (IGKV1-39)
QQSHSTPYT

SEQ ID NO: 3504 - protein, 13 aa, Homo sapiens
  Heavy chain CDR3 for antibody 1752 (IGHV4-39)
ARVPLTDFYYFDY

SEQ ID NO: 3505 - protein, 9 aa, Homo sapiens
  Light chain CDR3 for antibody 1753 (IGKV1-5)
QQYNSYSWT

SEQ ID NO: 3506 - protein, 15 aa, Homo sapiens
  Heavy chain CDR3 for antibody 1753 (IGHV1-69)
ARSVLQLERRYAFDI

SEQ ID NO: 3507 - protein, 9 aa, Homo sapiens
  Light chain CDR3 for antibody 1754 (IGKV1-39)
QQSYSSHWT

SEQ ID NO: 3508 - protein, 22 aa, Homo sapiens
  Heavy chain CDR3 for antibody 1754 (IGHV3-13)
ARGETSSTSSARARYYYYYMDV

SEQ ID NO: 3509 - protein, 10 aa, Homo sapiens
  Light chain CDR3 for antibody 1755 (IGKV1-39)
QQSYSTPPWT

SEQ ID NO: 3510 - protein, 13 aa, Homo sapiens
  Heavy chain CDR3 for antibody 1755 (IGHV3-64)
ARDWGQVTTWFDP

SEQ ID NO: 3511 - protein, 10 aa, Homo sapiens
  Light chain CDR3 for antibody 1756 (IGKV1-39)
QQSYSTPPWT

SEQ ID NO: 3512 - protein, 16 aa, Homo sapiens
  Heavy chain CDR3 for antibody 1756 (IGHV3-13)
ARGITTAAGLKYYFDY

SEQ ID NO: 3513 - protein, 9 aa, Homo sapiens
  Light chain CDR3 for antibody 1757 (IGKV1-39)
QQSHSTPWT

SEQ ID NO: 3514 - protein, 15 aa, Homo sapiens
  Heavy chain CDR3 for antibody 1757 (IGHV1-69)
ARSVLQLERRYAFDI

SEQ ID NO: 3515 - protein, 8 aa, Homo sapiens
  Light chain CDR3 for antibody 1758 (IGKV1-5)
QQYNSYNT

SEQ ID NO: 3516 - protein, 20 aa, Homo sapiens
  Heavy chain CDR3 for antibody 1758 (IGHV3-33)
AKSGGTYCSGGNCYGYYFDY

SEQ ID NO: 3517 - protein, 9 aa, Homo sapiens
  Light chain CDR3 for antibody 1759 (IGKV1-12)
QQANSFPIT

SEQ ID NO: 3518 - protein, 15 aa, Homo sapiens
  Heavy chain CDR3 for antibody 1759 (IGHV1-69)
ARSVLQLERRYAFDI

SEQ ID NO: 3519 - protein, 9 aa, Homo sapiens
  Light chain CDR3 for antibody 1760 (IGKV1-33)
QQYDNLPLT

SEQ ID NO: 3520 - protein, 21 aa, Homo sapiens
  Heavy chain CDR3 for antibody 1760 (IGHV3-33)
AKAGGGSYCGGGSCYSGYFDY

SEQ ID NO: 3521 - protein, 9 aa, Homo sapiens
  Light chain CDR3 for antibody 1761 (IGKV3-20)
QQYGSSPYT

SEQ ID NO: 3522 - protein, 19 aa, Homo sapiens
  Heavy chain CDR3 for antibody 1761 (IGHV2-26)
ARIQREVTIFGVVIFALDY

SEQ ID NO: 3523 - protein, 6 aa, Homo sapiens
  Light chain CDR3 for antibody 1762 (IGKV1-33)
QQNEGA

SEQ ID NO: 3524 - protein, 21 aa, Homo sapiens
  Heavy chain CDR3 for antibody 1762 (IGHV1-8)
ARGGWGSGGWYGKYFYYGMDV

SEQ ID NO: 3525 - protein, 9 aa, Homo sapiens
  Light chain CDR3 for antibody 1763 (IGKV1-13)
QHFNTYFLT

SEQ ID NO: 3526 - protein, 11 aa, Homo sapiens
  Heavy chain CDR3 for antibody 1763 (IGHV1-69)
ARENYGGACDY

SEQ ID NO: 3527 - protein, 10 aa, Homo sapiens
  Light chain CDR3 for antibody 1764 (IGKV3-11)
QQRSIWLGYT

SEQ ID NO: 3528 - protein, 18 aa, Homo sapiens
  Heavy chain CDR3 for antibody 1764 (IGHV1-18)
ARDSGYGGYDYWEPPLDY

SEQ ID NO: 3529 - protein, 9 aa, Homo sapiens
  Light chain CDR3 for antibody 1765 (IGKV3-20)
QQYGSSPYT

SEQ ID NO: 3530 - protein, 15 aa, Homo sapiens
  Heavy chain CDR3 for antibody 1765 (IGHV1-69)
ARSVLQLERRYAFDI

SEQ ID NO: 3531 - protein, 9 aa, Homo sapiens
  Light chain CDR3 for antibody 1766 (IGKV1-39)
QQSDSTPRT

SEQ ID NO: 3532 - protein, 11 aa, Homo sapiens
  Heavy chain CDR3 for antibody 1766 (IGHV3-53)
ARDLGPRGIDY

SEQ ID NO: 3533 - protein, 9 aa, Homo sapiens
  Light chain CDR3 for antibody 1767 (IGKV1-9)
QQLNSYPPL

SEQ ID NO: 3534 - protein, 22 aa, Homo sapiens
  Heavy chain CDR3 for antibody 1767 (IGHV3-13)
ARGETSSTSSARARYYYYYMDV

SEQ ID NO: 3535 - protein, 9 aa, Homo sapiens
  Light chain CDR3 for antibody 1768 (IGKV3-20)
QQYGSSSFT

SEQ ID NO: 3536 - protein, 10 aa, Homo sapiens
  Heavy chain CDR3 for antibody 1768 (IGHV4-28)
ATGDRVSVDY

SEQ ID NO: 3537 - protein, 9 aa, Homo sapiens
  Light chain CDR3 for antibody 1769 (IGKV4-1)
QQYYSLPLT

SEQ ID NO: 3538 - protein, 13 aa, Homo sapiens
  Heavy chain CDR3 for antibody 1769 (IGHV4-59)
TNRYGGYDSNFDS

SEQ ID NO: 3539 - protein, 10 aa, Homo sapiens
  Light chain CDR3 for antibody 1770 (IGKV3-11)
QQRSIWLGYT

SEQ ID NO: 3540 - protein, 15 aa, Homo sapiens
  Heavy chain CDR3 for antibody 1770 (IGHV1-69)
ARSVLQLERRYAFDI

SEQ ID NO: 3541 - protein, 9 aa, Homo sapiens
  Light chain CDR3 for antibody 1771 (IGKV3-11)
QQRSNWPIT

SEQ ID NO: 3542 - protein, 17 aa, Homo sapiens
  Heavy chain CDR3 for antibody 1771 (IGHV3-h)
ATAEVGTVTTYYYGMDV

SEQ ID NO: 3543 - protein, 9 aa, Homo sapiens
  Light chain CDR3 for antibody 1772 (IGKV1-13)
QQYSTYPLT

SEQ ID NO: 3544 - protein, 14 aa, Homo sapiens
  Heavy chain CDR3 for antibody 1772 (IGHV4-31)
ARDTDRSGYRGLDS

SEQ ID NO: 3545 - protein, 9 aa, Homo sapiens
  Light chain CDR3 for antibody 1773 (IGKV1-39)
QQSYSSHWT

SEQ ID NO: 3546 - protein, 11 aa, Homo sapiens
  Heavy chain CDR3 for antibody 1773 (IGHV3-53)
ARDLGPRGIDY

SEQ ID NO: 3547 - protein, 9 aa, Homo sapiens
  Light chain CDR3 for antibody 1774 (IGKV1-39)
QQSDSTPRT

SEQ ID NO: 3548 - protein, 15 aa, Homo sapiens
  Heavy chain CDR3 for antibody 1774 (IGHV1-46)
ARDSEVVPAARYFQH

SEQ ID NO: 3549 - protein, 10 aa, Homo sapiens
  Light chain CDR3 for antibody 1775 (IGKV1-39)
QQSYSTPPWT

SEQ ID NO: 3550 - protein, 11 aa, Homo sapiens
  Heavy chain CDR3 for antibody 1775 (IGHV3-53)
ARDLGPRGIDY

SEQ ID NO: 3551 - protein, 10 aa, Homo sapiens
  Light chain CDR3 for antibody 1776 (IGKV2-30)
MQGTHWPPWT

SEQ ID NO: 3552 - protein, 16 aa, Homo sapiens
  Heavy chain CDR3 for antibody 1776 (IGHV3-64)
ARDDDCSSTSCSPFDY

SEQ ID NO: 3553 - protein, 9 aa, Homo sapiens
  Light chain CDR3 for antibody 1777 (IGKV1-39)
QQSYTSPPT

SEQ ID NO: 3554 - protein, 15 aa, Homo sapiens
  Heavy chain CDR3 for antibody 1777 (IGHV1-69)
ARSVLQLERRYAFDI

SEQ ID NO: 3555 - protein, 10 aa, Homo sapiens
  Light chain CDR3 for antibody 1778 (IGKV3-11)
QQRSIWLGYT

SEQ ID NO: 3556 - protein, 11 aa, Homo sapiens
  Heavy chain CDR3 for antibody 1778 (IGHV3-53)
ARDLGPRGIDY

SEQ ID NO: 3557 - protein, 8 aa, Homo sapiens
  Light chain CDR3 for antibody 1779 (IGKV6-21)
HQTSSVYT

SEQ ID NO: 3558 - protein, 9 aa, Homo sapiens
  Heavy chain CDR3 for antibody 1779 (IGHV4-59)
ARVGGGLDY

SEQ ID NO: 3559 - protein, 9 aa, Homo sapiens
  Light chain CDR3 for antibody 1780 (IGKV1-9)
QQLNSYPPL

SEQ ID NO: 3560 - protein, 15 aa, Homo sapiens
  Heavy chain CDR3 for antibody 1780 (IGHV1-69)
ARSVLQLERRYAFDI

SEQ ID NO: 3561 - protein, 9 aa, Homo sapiens
  Light chain CDR3 for antibody 1781 (IGKV1-5)
QQYNSPPLT

SEQ ID NO: 3562 - protein, 20 aa, Homo sapiens
  Heavy chain CDR3 for antibody 1781 (IGHV1-18)
ARTQNVVRKEEHQLGSWFDP

SEQ ID NO: 3563 - protein, 9 aa, Homo sapiens
  Light chain CDR3 for antibody 1782 (IGKV1-5)
QQYNSYSWT

SEQ ID NO: 3564 - protein, 18 aa, Homo sapiens
  Heavy chain CDR3 for antibody 1782 (IGHV1-18)
ARDSGYGGYDYWEPPLDY

SEQ ID NO: 3565 - protein, 9 aa, Homo sapiens
  Light chain CDR3 for antibody 1783 (IGKV1-13)
QQFNSYPLT

SEQ ID NO: 3566 - protein, 20 aa, Homo sapiens
  Heavy chain CDR3 for antibody 1783 (IGHV4-30-2)
ARLPYYDFWSGYWTDSTGDY

SEQ ID NO: 3567 - protein, 9 aa, Homo sapiens
  Light chain CDR3 for antibody 1784 (IGKV1-9)
QQLNSYPPL

SEQ ID NO: 3568 - protein, 18 aa, Homo sapiens
  Heavy chain CDR3 for antibody 1784 (IGHV1-18)
ARDSGYGGYDYWEPPLDY

SEQ ID NO: 3569 - protein, 10 aa, Homo sapiens [sequence omitted]

SEQ ID NO: 3570 - protein, 21 aa, Homo sapiens
  Heavy chain CDR3 for antibody 1785 (IGHV4-34)
ARARWRELTIFGVVTSNWFDP

SEQ ID NO: 3571 - protein, 9 aa, Homo sapiens
  Light chain CDR3 for antibody 1786 (IGKV1-39)
QQSYTSPPT

SEQ ID NO: 3572 - protein, 14 aa, Homo sapiens
  Heavy chain CDR3 for antibody 1786 (IGHV1-18)
ARDFADWGYPLFDS

SEQ ID NO: 3573 - protein, 9 aa, Homo sapiens
  Light chain CDR3 for antibody 1787 (IGKV1-9)
QQLNSYPPL

SEQ ID NO: 3574 - protein, 13 aa, Homo sapiens
  Heavy chain CDR3 for antibody 1787 (IGHV3-64)
ARDWGQVTTWFDP

SEQ ID NO: 3575 - protein, 9 aa, Homo sapiens
  Light chain CDR3 for antibody 1788 (IGKV1-5)
QQYNSYSWT

SEQ ID NO: 3576 - protein, 15 aa, Homo sapiens
  Heavy chain CDR3 for antibody 1788 (IGHV1-46)
ARDSEVVPAARYFQH

SEQ ID NO: 3577 - protein, 10 aa, Homo sapiens
  Light chain CDR3 for antibody 1789 (IGKV3-11)
QQRSIWLGYT

SEQ ID NO: 3578 - protein, 13 aa, Homo sapiens
  Heavy chain CDR3 for antibody 1789 (IGHV4-39)
ARVPLTDFYYFDY

SEQ ID NO: 3579 - protein, 9 aa, Homo sapiens
  Light chain CDR3 for antibody 1790 (IGKV1-39)
QQSYSSHWT

SEQ ID NO: 3580 - protein, 14 aa, Homo sapiens
  Heavy chain CDR3 for antibody 1790 (IGHV2-70)
ARTPIAAAGSPFDP

SEQ ID NO: 3581 - protein, 10 aa, Homo sapiens
  Light chain CDR3 for antibody 1791 (IGKV3-11)
QQRSIWLGYT

SEQ ID NO: 3582 - protein, 14 aa, Homo sapiens
  Heavy chain CDR3 for antibody 1791 (IGHV2-70)
ARTPIAAAGSPFDP

SEQ ID NO: 3583 - protein, 10 aa, Homo sapiens
  Light chain CDR3 for antibody 1792 (IGKV1-5)
QQYKSNDPYT

SEQ ID NO: 3584 - protein, 10 aa, Homo sapiens
  Heavy chain CDR3 for antibody 1792 (IGHV3-21)
ARALSAAESY

SEQ ID NO: 3585 - protein, 9 aa, Homo sapiens
  Light chain CDR3 for antibody 1793 (IGKV1-9)
QQLNSYPPL

SEQ ID NO: 3586 - protein, 14 aa, Homo sapiens
  Heavy chain CDR3 for antibody 1793 (IGHV2-70)
ARTPIAAAGSPFDP

SEQ ID NO: 3587 - protein, 9 aa, Homo sapiens
  Light chain CDR3 for antibody 1794 (IGKV1-5)
QQYNSYSWT

SEQ ID NO: 3588 - protein, 11 aa, Homo sapiens
  Heavy chain CDR3 for antibody 1794 (IGHV3-53)
ARDLGPRGIDY

SEQ ID NO: 3589 - protein, 9 aa, Homo sapiens
  Light chain CDR3 for antibody 1795 (IGKV1-39)
QQSYSSHWT

SEQ ID NO: 3590 - protein, 18 aa, Homo sapiens
  Heavy chain CDR3 for antibody 1795 (IGHV1-18)
ARDSGYGGYDYWEPPLDY

SEQ ID NO: 3591 - protein, 9 aa, Homo sapiens
  Light chain CDR3 for antibody 1796 (IGKV1-9)
QQLNSYPPL

SEQ ID NO: 3592 - protein, 13 aa, Homo sapiens
  Heavy chain CDR3 for antibody 1796 (IGHV4-39)
ARVPLTDFYYFDY

SEQ ID NO: 3593 - protein, 10 aa, Homo sapiens
  Light chain CDR3 for antibody 1797 (IGKV3-20)
QQYGSSPPIT

SEQ ID NO: 3594 - protein, 20 aa, Homo sapiens
  Heavy chain CDR3 for antibody 1797 (IGHV2-26)
ARIGRERLIFGVVYYYYMDV

SEQ ID NO: 3595 - protein, 10 aa, Homo sapiens
  Light chain CDR3 for antibody 1798 (IGKV1-39)
QQSYSTPPWT

SEQ ID NO: 3596 - protein, 22 aa, Homo sapiens
  Heavy chain CDR3 for antibody 1798 (IGHV3-13)
ARGETSSTSSARARYYYYYMDV

SEQ ID NO: 3597 - protein, 9 aa, Homo sapiens
  Light chain CDR3 for antibody 1799 (IGKV1-5)
QQYNSYSWT

SEQ ID NO: 3598 - protein, 14 aa, Homo sapiens
  Heavy chain CDR3 for antibody 1799 (IGHV2-70)
ARTPIAAAGSPFDP

SEQ ID NO: 3599 - protein, 9 aa, Homo sapiens
  Light chain CDR3 for antibody 1800 (IGKV1-9)
QQLNSYPPL

SEQ ID NO: 3600 - protein, 16 aa, Homo sapiens
  Heavy chain CDR3 for antibody 1800 (IGHV3-13)
ARGITTAAGLKYYFDY

SEQ ID NO: 3601 - protein, 9 aa, Homo sapiens
  Light chain CDR3 for antibody 1801 (IGKV1-39)
QQSYSSHWT

SEQ ID NO: 3602 - protein, 15 aa, Homo sapiens
  Heavy chain CDR3 for antibody 1801 (IGHV1-69)
ARSVLQLERRYAFDI

SEQ ID NO: 3603 - protein, 9 aa, Homo sapiens
  Light chain CDR3 for antibody 1802 (IGKV1-39)
QQSYSSHWT

SEQ ID NO: 3604 - protein, 16 aa, Homo sapiens
  Heavy chain CDR3 for antibody 1802 (IGHV3-13)
ARGITTAAGLKYYFDY

SEQ ID NO: 3605 - protein, 11 aa, Homo sapiens
  Light chain CDR3 for antibody 1803 (IGKV3-15)
QQYNNWPPGVT

SEQ ID NO: 3606 - protein, 16 aa, Homo sapiens
  Heavy chain CDR3 for antibody 1803 (IGHV3-9)
AKGGSIAALFYQPFDY

SEQ ID NO: 3607 - protein, 10 aa, Homo sapiens
  Light chain CDR3 for antibody 1804 (IGKV1-39)
QQSYSTPPWT

SEQ ID NO: 3608 - protein, 18 aa, Homo sapiens
  Heavy chain CDR3 for antibody 1804 (IGHV1-18)
ARDSGYGGYDYWEPPLDY

SEQ ID NO: 3609 - protein, 10 aa, Homo sapiens
  Light chain CDR3 for antibody 1805 (IGKV1-39)
QQSYSTPPWT

SEQ ID NO: 3610 - protein, 15 aa, Homo sapiens
  Heavy chain CDR3 for antibody 1805 (IGHV1-69)
ARSVLQLERRYAFDI

SEQ ID NO: 3611 - protein, 8 aa, Homo sapiens
  Light chain CDR3 for antibody 1806 (IGKV1-39)
QQSYSSRS

SEQ ID NO: 3612 - protein, 9 aa, Homo sapiens
  Heavy chain CDR3 for antibody 1806 (IGHV1-46)
ARGADAFDI

SEQ ID NO: 3613 - protein, 9 aa, Homo sapiens
  Light chain CDR3 for antibody 1807 (IGKV1-39)
QQSYSSHWT

SEQ ID NO: 3614 - protein, 13 aa, Homo sapiens
  Heavy chain CDR3 for antibody 1807 (IGHV4-39)
ARVPLTDFYYFDY

SEQ ID NO: 3615 - protein, 10 aa, Homo sapiens
  Light chain CDR3 for antibody 1808 (IGKV1-33)
QQYDNLPVLT

SEQ ID NO: 3616 - protein, 20 aa, Homo sapiens
  Heavy chain CDR3 for antibody 1808 (IGHV3-11)
AKDLSWYCGAGSCSGGTFDY

SEQ ID NO: 3617 - protein, 10 aa, Homo sapiens
  Light chain CDR3 for antibody 1809 (IGKV1-5)
QQYKSNDPYT

SEQ ID NO: 3618 - protein, 16 aa, Homo sapiens
  Heavy chain CDR3 for antibody 1809 (IGHV1-18)
ARGLRYFDWLFSSMDV

SEQ ID NO: 3619 - protein, 9 aa, Homo sapiens
  Light chain CDR3 for antibody 1810 (IGKV1-39)
QQSYSTPYT

SEQ ID NO: 3620 - protein, 17 aa, Homo sapiens
  Heavy chain CDR3 for antibody 1810 (IGHV1-69)
ARGGYSSGHTSGWYFDL

SEQ ID NO: 3621 - protein, 9 aa, Homo sapiens
  Light chain CDR3 for antibody 1811 (IGKV1-9)
QQLNSYPPL

SEQ ID NO: 3622 - protein, 15 aa, Homo sapiens
  Heavy chain CDR3 for antibody 1811 (IGHV1-46)
ARDSEVVPAARYFQH

SEQ ID NO: 3623 - protein, 9 aa, Homo sapiens
  Light chain CDR3 for antibody 1812 (IGKV1-39)
QQSYSSHWT

SEQ ID NO: 3624 - protein, 21 aa, Homo sapiens
  Heavy chain CDR3 for antibody 1812 (IGHV3-13)
ARGETSSTSSARARYYYYMDV

SEQ ID NO: 3625 - protein, 9 aa, Homo sapiens
  Light chain CDR3 for antibody 1813 (IGKV1-17)
LQHNSYPLT

SEQ ID NO: 3626 - protein, 12 aa, Homo sapiens
  Heavy chain CDR3 for antibody 1813 (IGHV4-39)
ARRGETSEYFHL

SEQ ID NO: 3627 - protein, 9 aa, Homo sapiens
  Light chain CDR3 for antibody 1814 (IGKV3-20)
QQANSFPRT

SEQ ID NO: 3628 - protein, 18 aa, Homo sapiens
  Heavy chain CDR3 for antibody 1814 (IGHV4-31)
ARESEYYYDSSGWGAFDI

SEQ ID NO: 3629 - protein, 9 aa, Homo sapiens
  Light chain CDR3 for antibody 1815 (IGKV3-20)
QQYGSSSWT

SEQ ID NO: 3630 - protein, 16 aa, Homo sapiens
  Heavy chain CDR3 for antibody 1815 (IGHV3-33)
AKEEYCSTTSCHCLDY

SEQ ID NO: 3631 - protein, 10 aa, Homo sapiens
  Light chain CDR3 for antibody 1816 (IGKV3-11)
QQRSIWLGYT

SEQ ID NO: 3632 - protein, 22 aa, Homo sapiens
  Heavy chain CDR3 for antibody 1816 (IGHV3-13)
ARGETSSTSSARARYYYYYMDV

SEQ ID NO: 3633 - protein, 9 aa, Homo sapiens
  Light chain CDR3 for antibody 1817 (IGKV1-39)
QQSDSTPRT

SEQ ID NO: 3634 - protein, 14 aa, Homo sapiens
  Heavy chain CDR3 for antibody 1817 (IGHV1-69)
ARMYSGYYYYGMDV

SEQ ID NO: 3635 - protein, 9 aa, Homo sapiens
  Light chain CDR3 for antibody 1818 (IGKV1-12)
QQANSFPIT

SEQ ID NO: 3636 - protein, 18 aa, Homo sapiens
  Heavy chain CDR3 for antibody 1818 (IGHV1-18)
ARDSGYGGYDYWEPPLDY

SEQ ID NO: 3637 - protein, 9 aa, Homo sapiens
  Light chain CDR3 for antibody 1819 (IGKV1-13)
QQYNSYPLT

SEQ ID NO: 3638 - protein, 20 aa, Homo sapiens
  Heavy chain CDR3 for antibody 1819 (IGHV4-59)
ARVSSIAAREWFHYYYYMDV

SEQ ID NO: 3639 - protein, 9 aa, Homo sapiens
  Light chain CDR3 for antibody 1820 (IGKV1-39)
QQSYSSHWT

SEQ ID NO: 3640 - protein, 15 aa, Homo sapiens
  Heavy chain CDR3 for antibody 1820 (IGHV1-46)
ARDSEVVPAARYFQH

SEQ ID NO: 3641 - protein, 8 aa, Homo sapiens
  Light chain CDR3 for antibody 1821 (IGKV1-13)
QQSYSTLT

SEQ ID NO: 3642 - protein, 11 aa, Homo sapiens
  Heavy chain CDR3 for antibody 1821 (IGHV1-69)
ARENYGGACDY

SEQ ID NO: 3643 - protein, 9 aa, Homo sapiens
  Light chain CDR3 for antibody 1822 (IGKV3-20)
QQLKTYPFT

SEQ ID NO: 3644 - protein, 19 aa, Homo sapiens
  Heavy chain CDR3 for antibody 1822 (IGHV1-46)
ASVRWSKLGGVYYYYGLDV

SEQ ID NO: 3645 - protein, 9 aa, Homo sapiens
  Light chain CDR3 for antibody 1823 (IGKV1-33)
QQYDNLPLT

SEQ ID NO: 3646 - protein, 11 aa, Homo sapiens
  Heavy chain CDR3 for antibody 1823 (IGHV3-53)
ARDLGPRGIDY

SEQ ID NO: 3647 - protein, 9 aa, Homo sapiens
  Light chain CDR3 for antibody 1824 (IGKV1-39)
QQSYSTPRT

SEQ ID NO: 3648 - protein, 10 aa, Homo sapiens
  Heavy chain CDR3 for antibody 1824 (IGHV3-21)
ARALSAAESY

SEQ ID NO: 3649 - protein, 8 aa, Homo sapiens
  Light chain CDR3 for antibody 1825 (IGKV3-20)
QQYGSSLT

SEQ ID NO: 3650 - protein, 26 aa, Homo sapiens
  Heavy chain CDR3 for antibody 1825 (IGHV1-69)
AREGNVDYDFWSGYSRPRYYYYYMDV

SEQ ID NO: 3651 - protein, 9 aa, Homo sapiens
  Light chain CDR3 for antibody 1826 (IGKV1-39)
KQTRSSPRT

SEQ ID NO: 3652 - protein, 21 aa, Homo sapiens
  Heavy chain CDR3 for antibody 1826 (IGHV4-30-4)
ARGQTSARIPIFGVVLKHVDY

SEQ ID NO: 3653 - protein, 9 aa, Homo sapiens
  Light chain CDR3 for antibody 1827 (IGKV3-20)
QQYGSSPYT

SEQ ID NO: 3654 - protein, 14 aa, Homo sapiens
  Heavy chain CDR3 for antibody 1827 (IGHV2-70)
ARTPIAAAGSPFDP

SEQ ID NO: 3655 - protein, 9 aa, Homo sapiens
  Light chain CDR3 for antibody 1828 (IGKV1-39)
QQSDSTPRT

SEQ ID NO: 3656 - protein, 13 aa, Homo sapiens
  Heavy chain CDR3 for antibody 1828 (IGHV3-64)
ARDWGQVTTWFDP

SEQ ID NO: 3657 - protein, 9 aa, Homo sapiens
  Light chain CDR3 for antibody 1829 (IGKV3-11)
QQRSNWPLS

SEQ ID NO: 3658 - protein, 16 aa, Homo sapiens
  Heavy chain CDR3 for antibody 1829 (IGHV3-33)
AKEEYCSTTSCHCLDY

SEQ ID NO: 3659 - protein, 11 aa, Homo sapiens
  Light chain CDR3 for antibody 1830 (IGKV1-12)
QQANTFPPSLT

SEQ ID NO: 3660 - protein, 11 aa, Homo sapiens
  Heavy chain CDR3 for antibody 1830 (IGHV4-59)
ARVITLTHMDL

SEQ ID NO: 3661 - protein, 9 aa, Homo sapiens
  Light chain CDR3 for antibody 1831 (IGKV1-5)
QQYNSYSWT

SEQ ID NO: 3662 - protein, 22 aa, Homo sapiens
  Heavy chain CDR3 for antibody 1831 (IGHV3-13)
ARGETSSTSSARARYYYYYMDV

SEQ ID NO: 3663 - protein, 9 aa, Homo sapiens
  Light chain CDR3 for antibody 1832 (IGKV1-39)
QQSYSSHWT

SEQ ID NO: 3664 - protein, 13 aa, Homo sapiens
  Heavy chain CDR3 for antibody 1832 (IGHV3-64)
ARDWGQVTTWFDP

SEQ ID NO: 3665 - protein, 9 aa, Homo sapiens
  Light chain CDR3 for antibody 1833 (IGKV3-20)
QQYGSSPYT

SEQ ID NO: 3666 - protein, 15 aa, Homo sapiens
  Heavy chain CDR3 for antibody 1833 (IGHV1-46)
ARDSEVVPAARYFQH

SEQ ID NO: 3667 - protein, 10 aa, Homo sapiens
  Light chain CDR3 for antibody 1834 (IGKV1-39)
QQSYSTPPWT

SEQ ID NO: 3668 - protein, 14 aa, Homo sapiens
  Heavy chain CDR3 for antibody 1834 (IGHV2-70)
ARTPIAAAGSPFDP

SEQ ID NO: 3669 - protein, 10 aa, Homo sapiens [sequence omitted]

SEQ ID NO: 3670 - protein, 15 aa, Homo sapiens
  Heavy chain CDR3 for antibody 1835 (IGHV1-69)
ARSVLQLERRYAFDI

SEQ ID NO: 3671 - protein, 9 aa, Homo sapiens
  Light chain CDR3 for antibody 1836 (IGKV1-9)
QQLNSYPPL

SEQ ID NO: 3672 - protein, 10 aa, Homo sapiens
  Heavy chain CDR3 for antibody 1836 (IGHV3-21)
ARALSAAESY

SEQ ID NO: 3673 - protein, 11 aa, Homo sapiens
  Light chain CDR3 for antibody 1837 (IGKV2-30)
MQGTHWPLMYT

SEQ ID NO: 3674 - protein, 13 aa, Homo sapiens
  Heavy chain CDR3 for antibody 1837 (IGHV1-69)
ARHYDSSGNPRDY

SEQ ID NO: 3675 - protein, 9 aa, Homo sapiens
  Light chain CDR3 for antibody 1838 (IGKV1-13)
QQFNSYPIT

SEQ ID NO: 3676 - protein, 13 aa, Homo sapiens
  Heavy chain CDR3 for antibody 1838 (IGHV1-18)
ARDLGYSSSSGDY

SEQ ID NO: 3677 - protein, 11 aa, Homo sapiens
  Light chain CDR3 for antibody 1839 (IGKV1-12)
QQANSFPPGLT

SEQ ID NO: 3678 - protein, 15 aa, Homo sapiens
  Heavy chain CDR3 for antibody 1839 (IGHV4-31)
ARGGGSYYDRGAMGY

SEQ ID NO: 3679 - protein, 9 aa, Homo sapiens
  Light chain CDR3 for antibody 1840 (IGKV1-12)
QQANSFPIT

SEQ ID NO: 3680 - protein, 13 aa, Homo sapiens
  Heavy chain CDR3 for antibody 1840 (IGHV3-21)
TRSYWTGYNWFDP

SEQ ID NO: 3681 - protein, 10 aa, Homo sapiens
  Light chain CDR3 for antibody 1841 (IGKV1-39)
QQSYSTPPWT

SEQ ID NO: 3682 - protein, 13 aa, Homo sapiens
  Heavy chain CDR3 for antibody 1841 (IGHV4-39)
ARVPLTDFYYFDY

SEQ ID NO: 3683 - protein, 8 aa, Homo sapiens
  Light chain CDR3 for antibody 1842 (IGKV1-5)
QQYNSYNT

SEQ ID NO: 3684 - protein, 11 aa, Homo sapiens
  Heavy chain CDR3 for antibody 1842 (IGHV3-53)
ARDLGPRGIDY

SEQ ID NO: 3685 - protein, 9 aa, Homo sapiens
  Light chain CDR3 for antibody 1843 (IGKV1-9)
QQLNSYPPL

SEQ ID NO: 3686 - protein, 13 aa, Homo sapiens
  Heavy chain CDR3 for antibody 1843 (IGHV3-64)
ARGAGNFLYWFDP

SEQ ID NO: 3687 - protein, 6 aa, Homo sapiens
  Light chain CDR3 for antibody 1844 (IGKV1-33)
QQNEGA

SEQ ID NO: 3688 - protein, 18 aa, Homo sapiens
  Heavy chain CDR3 for antibody 1844 (IGHV1-18)
ARDSGYGGYDYWEPPLDY

SEQ ID NO: 3689 - protein, 9 aa, Homo sapiens
  Light chain CDR3 for antibody 1845 (IGKV1-13)
QQYNSYPLT

SEQ ID NO: 3690 - protein, 16 aa, Homo sapiens
  Heavy chain CDR3 for antibody 1845 (IGHV4-34)
ARDPRTIFGVVREFDI

SEQ ID NO: 3691 - protein, 9 aa, Homo sapiens
  Light chain CDR3 for antibody 1846 (IGKV1-39)
QQSDSTPRT

SEQ ID NO: 3692 - protein, 16 aa, Homo sapiens
  Heavy chain CDR3 for antibody 1846 (IGHV3-13)
ARGITTAAGLKYYFDY

SEQ ID NO: 3693 - protein, 8 aa, Homo sapiens
  Light chain CDR3 for antibody 1847 (IGKV1-5)
QQYRSFWT

SEQ ID NO: 3694 - protein, 15 aa, Homo sapiens
  Heavy chain CDR3 for antibody 1847 (IGHV3-48)
VRDHMSGQQLLRPDC

SEQ ID NO: 3695 - protein, 9 aa, Homo sapiens
  Light chain CDR3 for antibody 1848 (IGKV1-13)
QQYDNLLLT

SEQ ID NO: 3696 - protein, 23 aa, Homo sapiens
  Heavy chain CDR3 for antibody 1848 (IGHV4-34)
ARASISIFGVAIIPIGYSHYMDV

SEQ ID NO: 3697 - protein, 9 aa, Homo sapiens
  Light chain CDR3 for antibody 1849 (IGKV1-5)
QQYNSYSWT

SEQ ID NO: 3698 - protein, 13 aa, Homo sapiens
  Heavy chain CDR3 for antibody 1849 (IGHV4-39)
ARVPLTDFYYFDY

SEQ ID NO: 3699 - protein, 8 aa, Homo sapiens
  Light chain CDR3 for antibody 1850 (IGKV1-5)
QQYNSYNT

SEQ ID NO: 3700 - protein, 22 aa, Homo sapiens
  Heavy chain CDR3 for antibody 1850 (IGHV3-13)
ARGETSSTSSARARYYYYYMDV

SEQ ID NO: 3701 - protein, 9 aa, Homo sapiens
  Light chain CDR3 for antibody 1851 (IGKV1-9)
QQLNSYPLT

SEQ ID NO: 3702 - protein, 11 aa, Homo sapiens
  Heavy chain CDR3 for antibody 1851 (IGHV3-15)
TTDQAAVWFDP

SEQ ID NO: 3703 - protein, 9 aa, Homo sapiens
  Light chain CDR3 for antibody 1852 (IGKV1-33)
QQYQDRPWT

SEQ ID NO: 3704 - protein, 10 aa, Homo sapiens
  Heavy chain CDR3 for antibody 1852 (IGHV3-21)
ARALSAAESY

SEQ ID NO: 3705 - protein, 10 aa, Homo sapiens
  Light chain CDR3 for antibody 1853 (IGKV1-39)
QQSYSTPPWT

SEQ ID NO: 3706 - protein, 15 aa, Homo sapiens
  Heavy chain CDR3 for antibody 1853 (IGHV1-46)
ARDSEVVPAARYFQH

SEQ ID NO: 3707 - protein, 10 aa, Homo sapiens
  Light chain CDR3 for antibody 1854 (IGKV3-11)
QQRSIWLGYT

SEQ ID NO: 3708 - protein, 13 aa, Homo sapiens
  Heavy chain CDR3 for antibody 1854 (IGHV3-64)
ARDWGQVTTWFDP

SEQ ID NO: 3709 - protein, 6 aa, Homo sapiens
  Light chain CDR3 for antibody 1855 (IGKV1-33)
QQNEGA

SEQ ID NO: 3710 - protein, 15 aa, Homo sapiens
  Heavy chain CDR3 for antibody 1855 (IGHV1-69)
ARSVLQLERRYAFDI

SEQ ID NO: 3711 - protein, 10 aa, Homo sapiens
  Light chain CDR3 for antibody 1856 (IGKV3-11)
QQRGIWLGYT

SEQ ID NO: 3712 - protein, 15 aa, Homo sapiens
  Heavy chain CDR3 for antibody 1856 (IGHV1-46)
ARDSEVVPAARYFEH

SEQ ID NO: 3713 - protein, 8 aa, Homo sapiens
  Light chain CDR3 for antibody 1857 (IGKV1-9)
QQLNSYRT

SEQ ID NO: 3714 - protein, 17 aa, Homo sapiens
  Heavy chain CDR3 for antibody 1857 (IGHV3-9)
AKDLIKPGIAVAGPFDY

SEQ ID NO: 3715 - protein, 9 aa, Homo sapiens
  Light chain CDR3 for antibody 1858 (IGKV1-33)
QQYDNLPLT

SEQ ID NO: 3716 - protein, 22 aa, Homo sapiens
  Heavy chain CDR3 for antibody 1858 (IGHV3-13)
ARGETSSTSSARARYYYYYMDV

SEQ ID NO: 3717 - protein, 9 aa, Homo sapiens
  Light chain CDR3 for antibody 1859 (IGKV1-9)
QQLNSYPPL

SEQ ID NO: 3718 - protein, 20 aa, Homo sapiens
  Heavy chain CDR3 for antibody 1859 (IGHV3-33)
AKSGGTYCSGGNCYGYYFDY

SEQ ID NO: 3719 - protein, 10 aa, Homo sapiens
  Light chain CDR3 for antibody 1860 (IGKV3-11)
QQRSIWLGYT

SEQ ID NO: 3720 - protein, 10 aa, Homo sapiens
  Heavy chain CDR3 for antibody 1860 (IGHV3-21)
ARALSAAESY

SEQ ID NO: 3721 - protein, 9 aa, Homo sapiens
  Light chain CDR3 for antibody 1861 (IGKV3-15)
QQYNNWPLT

SEQ ID NO: 3722 - protein, 11 aa, Homo sapiens
  Heavy chain CDR3 for antibody 1861 (IGHV1-69)
ASGGSSYGSDY

SEQ ID NO: 3723 - protein, 10 aa, Homo sapiens
  Light chain CDR3 for antibody 1862 (IGKV1-39)
QQSYSSPALS

SEQ ID NO: 3724 - protein, 10 aa, Homo sapiens
  Heavy chain CDR3 for antibody 1862 (IGHV1-69)
ARDLGNYGAY

SEQ ID NO: 3725 - protein, 9 aa, Homo sapiens
  Light chain CDR3 for antibody 1863 (IGKV1-39)
QQSYSSPWT

SEQ ID NO: 3726 - protein, 16 aa, Homo sapiens
  Heavy chain CDR3 for antibody 1863 (IGHV1-69)
ATVPLGYSGFAFFFDY

SEQ ID NO: 3727 - protein, 9 aa, Homo sapiens
  Light chain CDR3 for antibody 1864 (IGKV1-39)
QQSYSSHWT

SEQ ID NO: 3728 - protein, 10 aa, Homo sapiens
  Heavy chain CDR3 for antibody 1864 (IGHV3-21)
ARALSAAESY

SEQ ID NO: 3729 - protein, 10 aa, Homo sapiens
  Light chain CDR3 for antibody 1865 (IGKV2-30)
MQGTHWPPWT

SEQ ID NO: 3730 - protein, 11 aa, Homo sapiens
  Heavy chain CDR3 for antibody 1865 (IGHV3-53)
ARDLGPRGIDY

SEQ ID NO: 3731 - protein, 9 aa, Homo sapiens
  Light chain CDR3 for antibody 1866 (IGKV3-20)
QQYGSSPYT

SEQ ID NO: 3732 - protein, 13 aa, Homo sapiens
  Heavy chain CDR3 for antibody 1866 (IGHV4-39)
ARVPLTDFYYFDY

SEQ ID NO: 3733 - protein, 9 aa, Homo sapiens
  Light chain CDR3 for antibody 1867 (IGKV1-12)
QQANSFPIT

SEQ ID NO: 3734 - protein, 15 aa, Homo sapiens
  Heavy chain CDR3 for antibody 1867 (IGHV1-46)
ARDSEVVPAARYFQH

SEQ ID NO: 3735 - protein, 10 aa, Homo sapiens
  Light chain CDR3 for antibody 1868 (IGKV3-15)
HQYNKWPPFT

SEQ ID NO: 3736 - protein, 19 aa, Homo sapiens
  Heavy chain CDR3 for antibody 1868 (IGHV3-21)
ARGNQIAAVAAAIPNWFDP

SEQ ID NO: 3737 - protein, 9 aa, Homo sapiens
  Light chain CDR3 for antibody 1869 (IGKV1-39)
QQSDSTPRT

SEQ ID NO: 3738 - protein, 11 aa, Homo sapiens
  Heavy chain CDR3 for antibody 1869 (IGHV1-69)
ARENYGGACDY

SEQ ID NO: 3739 - protein, 9 aa, Homo sapiens
  Light chain CDR3 for antibody 1870 (IGKV1-9)
QQLNSYPPL

SEQ ID NO: 3740 - protein, 21 aa, Homo sapiens
  Heavy chain CDR3 for antibody 1870 (IGHV1-8)
ARGGWGSGGWYGKYFYYGMDV

SEQ ID NO: 3741 - protein, 9 aa, Homo sapiens
  Light chain CDR3 for antibody 1871 (IGKV1-39)
QQSDSTPRT

SEQ ID NO: 3742 - protein, 20 aa, Homo sapiens
  Heavy chain CDR3 for antibody 1871 (IGHV3-33)
AKSGGTYCSGGNCYGYYFDY

SEQ ID NO: 3743 - protein, 9 aa, Homo sapiens
  Light chain CDR3 for antibody 1872 (IGKV1-17)
LQHNSYPLT

SEQ ID NO: 3744 - protein, 14 aa, Homo sapiens
  Heavy chain CDR3 for antibody 1872 (IGHV4-39)
ARLTRGYSYGTIDY

SEQ ID NO: 3745 - protein, 9 aa, Homo sapiens
  Light chain CDR3 for antibody 1873 (IGKV1-39)
QQSYSTPYT

SEQ ID NO: 3746 - protein, 17 aa, Homo sapiens
  Heavy chain CDR3 for antibody 1873 (IGHV1-2)
ARDDCSGGSCYSAWFDP

SEQ ID NO: 3747 - protein, 9 aa, Homo sapiens
  Light chain CDR3 for antibody 1874 (IGKV3-20)
QQYGSSPYT

SEQ ID NO: 3748 - protein, 18 aa, Homo sapiens
  Heavy chain CDR3 for antibody 1874 (IGHV1-18)
ARDSGYGGYDYWEPPLDY

SEQ ID NO: 3749 - protein, 9 aa, Homo sapiens
  Light chain CDR3 for antibody 1875 (IGKV1-33)
QQYDNLPLT

SEQ ID NO: 3750 - protein, 14 aa, Homo sapiens
  Heavy chain CDR3 for antibody 1875 (IGHV2-70)
ARTPIAAAGSPFDP

SEQ ID NO: 3751 - protein, 10 aa, Homo sapiens
  Light chain CDR3 for antibody 1876 (IGKV3-11)
QQRSIWLGYT

SEQ ID NO: 3752 - protein, 21 aa, Homo sapiens
  Heavy chain CDR3 for antibody 1876 (IGHV3-33)
AKAGGGSYCGGGSCYSGYFDY

SEQ ID NO: 3753 - protein, 9 aa, Homo sapiens
  Light chain CDR3 for antibody 1877 (IGKV1-39)
QQSYSTPPT

SEQ ID NO: 3754 - protein, 13 aa, Homo sapiens
  Heavy chain CDR3 for antibody 1877 (IGHV4-30-2)
ASSVDTAMGDFDY

SEQ ID NO: 3755 - protein, 9 aa, Homo sapiens
  Light chain CDR3 for antibody 1878 (IGKV1-33)
QQYDNLPLT

SEQ ID NO: 3756 - protein, 10 aa, Homo sapiens
  Heavy chain CDR3 for antibody 1878 (IGHV3-21)
ARALSAAESY

SEQ ID NO: 3757 - protein, 9 aa, Homo sapiens
  Light chain CDR3 for antibody 1879 (IGKV1-5)
QQYNSPPLT

SEQ ID NO: 3758 - protein, 18 aa, Homo sapiens
  Heavy chain CDR3 for antibody 1879 (IGHV1-18)
ARDSGYGGYDYWEPPLDY

SEQ ID NO: 3759 - protein, 9 aa, Homo sapiens
  Light chain CDR3 for antibody 1880 (IGKV1-12)
QQANSFPIT

SEQ ID NO: 3760 - protein, 14 aa, Homo sapiens
  Heavy chain CDR3 for antibody 1880 (IGHV2-70)
ARTPIAAAGSPFDP

SEQ ID NO: 3761 - protein, 9 aa, Homo sapiens
  Light chain CDR3 for antibody 1881 (IGKV1-9)
QQLNSYPPL

SEQ ID NO: 3762 - protein, 21 aa, Homo sapiens
  Heavy chain CDR3 for antibody 1881 (IGHV3-33)
AKAGGGSYCGGGSCYSGYFDY

SEQ ID NO: 3763 - protein, 9 aa, Homo sapiens
  Light chain CDR3 for antibody 1882 (IGKV1-13)
QQYSTYPLT

SEQ ID NO: 3764 - protein, 14 aa, Homo sapiens
  Heavy chain CDR3 for antibody 1882 (IGHV1-69)
ARMYSGYYYYGMDV

SEQ ID NO: 3765 - protein, 9 aa, Homo sapiens
  Light chain CDR3 for antibody 1883 (IGKV1-9)
QQLNSYPPL

SEQ ID NO: 3766 - protein, 14 aa, Homo sapiens
  Heavy chain CDR3 for antibody 1883 (IGHV1-69)
ARMYSGYYYYGMDV

SEQ ID NO: 3767 - protein, 10 aa, Homo sapiens
  Light chain CDR3 for antibody 1884 (IGKV1-5)
QQYKSNDPYT

SEQ ID NO: 3768 - protein, 19 aa, Homo sapiens
  Heavy chain CDR3 for antibody 1884 (IGHV2-26)
ARIQREVTIFGVVIFALDY

SEQ ID NO: 3769 - protein, 8 aa, Homo sapiens
  Light chain CDR3 for antibody 1885 (IGKV1-9)
QQLNSFPR

SEQ ID NO: 3770 - protein, 11 aa, Homo sapiens
  Heavy chain CDR3 for antibody 1885 (IGHV4-31)
ARGLSHYGMDV

SEQ ID NO: 3771 - protein, 9 aa, Homo sapiens
  Light chain CDR3 for antibody 1886 (IGKV1-39)
QQSDSTPRT

SEQ ID NO: 3772 - protein, 13 aa, Homo sapiens
  Heavy chain CDR3 for antibody 1886 (IGHV3-21)
ARGAGNFLYWFDP

SEQ ID NO: 3773 - protein, 9 aa, Homo sapiens
  Light chain CDR3 for antibody 1887 (IGKV1-39)
QQSDSTPRT

SEQ ID NO: 3774 - protein, 21 aa, Homo sapiens
  Heavy chain CDR3 for antibody 1887 (IGHV1-8)
ARGGWGSGGWYGKYFYYGMDV

SEQ ID NO: 3775 - protein, 10 aa, Homo sapiens
  Light chain CDR3 for antibody 1888 (IGKV3-11)
QQRSIWLGYT

SEQ ID NO: 3776 - protein, 20 aa, Homo sapiens
  Heavy chain CDR3 for antibody 1888 (IGHV3-33)
AKSGGTYCSGGNCYGYYFDY

SEQ ID NO: 3777 - protein, 9 aa, Homo sapiens
  Light chain CDR3 for antibody 1889 (IGKV1-16)
QQYHSYPFT

SEQ ID NO: 3778 - protein, 23 aa, Homo sapiens
  Heavy chain CDR3 for antibody 1889 (IGHV3-23)
ARTTYYDFWSGYWDPNYYYYMDV

SEQ ID NO: 3779 - protein, 9 aa, Homo sapiens
  Light chain CDR3 for antibody 1890 (IGKV1-5)
QQYNSYSWT

SEQ ID NO: 3780 - protein, 13 aa, Homo sapiens
  Heavy chain CDR3 for antibody 1890 (IGHV3-64)
ARDWGQVTTWFDP

SEQ ID NO: 3781 - protein, 9 aa, Homo sapiens
  Light chain CDR3 for antibody 1891 (IGKV1-27)
QRYNSAPLT

SEQ ID NO: 3782 - protein, 12 aa, Homo sapiens
  Heavy chain CDR3 for antibody 1891 (IGHV1-18)
ARDAGDQFLIRD

SEQ ID NO: 3783 - protein, 10 aa, Homo sapiens
  Light chain CDR3 for antibody 1892 (IGKV3-11)
QQRSIWLGYT

SEQ ID NO: 3784 - protein, 15 aa, Homo sapiens
  Heavy chain CDR3 for antibody 1892 (IGHV1-46)
ARDSEVVAAAGYFEH

SEQ ID NO: 3785 - protein, 9 aa, Homo sapiens
  Light chain CDR3 for antibody 1893 (IGKV4-1)
QQYYSSPLT

SEQ ID NO: 3786 - protein, 18 aa, Homo sapiens
  Heavy chain CDR3 for antibody 1893 (IGHV4-31)
ARGVASSSWLNHLYYMDV

SEQ ID NO: 3787 - protein, 9 aa, Homo sapiens
  Light chain CDR3 for antibody 1894 (IGKV1-13)
QHFNTYLLT

SEQ ID NO: 3788 - protein, 11 aa, Homo sapiens
  Heavy chain CDR3 for antibody 1894 (IGHV1-69)
ARENYGGAFDH

SEQ ID NO: 3789 - protein, 9 aa, Homo sapiens
  Light chain CDR3 for antibody 1895 (IGKV1-13)
QHFNTYFLT

SEQ ID NO: 3790 - protein, 18 aa, Homo sapiens
  Heavy chain CDR3 for antibody 1895 (IGHV1-18)
ARDSGYGGYDYWEPPLDY

SEQ ID NO: 3791 - protein, 10 aa, Homo sapiens
  Light chain CDR3 for antibody 1896 (IGKV1-39)
QQSYSTPPWT

SEQ ID NO: 3792 - protein, 10 aa, Homo sapiens
  Heavy chain CDR3 for antibody 1896 (IGHV3-21)
ARALSAAESY

SEQ ID NO: 3793 - protein, 8 aa, Homo sapiens
  Light chain CDR3 for antibody 1897 (IGKV1-5)
QQYNSYNT

SEQ ID NO: 3794 - protein, 13 aa, Homo sapiens
  Heavy chain CDR3 for antibody 1897 (IGHV4-39)
ARVPLTDFYYFDY

SEQ ID NO: 3795 - protein, 9 aa, Homo sapiens
  Light chain CDR3 for antibody 1898 (IGKV1-13)
QQFNSYPLT

SEQ ID NO: 3796 - protein, 14 aa, Homo sapiens
  Heavy chain CDR3 for antibody 1898 (IGHV4-59)
ARVWLVITTPDFDY

SEQ ID NO: 3797 - protein, 9 aa, Homo sapiens
  Light chain CDR3 for antibody 1899 (IGKV1-9)
QQLNSYPPL

SEQ ID NO: 3798 - protein, 16 aa, Homo sapiens
  Heavy chain CDR3 for antibody 1899 (IGHV3-53)
ARDDDCSSTSCSPFDY

SEQ ID NO: 3799 - protein, 10 aa, Homo sapiens
  Light chain CDR3 for antibody 1900 (IGKV1-5)
QQYKSNDPYT

SEQ ID NO: 3800 - protein, 14 aa, Homo sapiens
  Heavy chain CDR3 for antibody 1900 (IGHV4-39)
ARLTRGYSYGTIDY

SEQ ID NO: 3801 - protein, 6 aa, Homo sapiens
  Light chain CDR3 for antibody 1901 (IGKV5-2)
LQHDNL

SEQ ID NO: 3802 - protein, 20 aa, Homo sapiens
  Heavy chain CDR3 for antibody 1901 (IGHV3-48)
ARVKPARITIFGVVPPYMDV

SEQ ID NO: 3803 - protein, 10 aa, Homo sapiens
  Light chain CDR3 for antibody 1902 (IGKV1-39)
QQSYSTPPWT

SEQ ID NO: 3804 - protein, 20 aa, Homo sapiens
  Heavy chain CDR3 for antibody 1902 (IGHV3-33)
AKSGGTYCSGGNCYGYYFDY

SEQ ID NO: 3805 - protein, 9 aa, Homo sapiens
  Light chain CDR3 for antibody 1903 (IGKV3-11)
QQRSNWPIT

SEQ ID NO: 3806 - protein, 13 aa, Homo sapiens
  Heavy chain CDR3 for antibody 1903 (IGHV3-64)
ARDWGQVTTWFDP

SEQ ID NO: 3807 - protein, 9 aa, Homo sapiens
  Light chain CDR3 for antibody 1904 (IGKV1-9)
QQLNSYPHT

SEQ ID NO: 3808 - protein, 17 aa, Homo sapiens
  Heavy chain CDR3 for antibody 1904 (IGHV1-58)
AAGQSSGWDYYYYGMDV

SEQ ID NO: 3809 - protein, 9 aa, Homo sapiens
  Light chain CDR3 for antibody 1905 (IGKV1-39)
QQSYTSPPT

SEQ ID NO: 3810 - protein, 15 aa, Homo sapiens
  Heavy chain CDR3 for antibody 1905 (IGHV1-46)
ARDSEVVPAARYFQH

SEQ ID NO: 3811 - protein, 9 aa, Homo sapiens
  Light chain CDR3 for antibody 1906 (IGKV1-13)
QHFNTYFLT

SEQ ID NO: 3812 - protein, 15 aa, Homo sapiens
  Heavy chain CDR3 for antibody 1906 (IGHV1-46)
ARDSEVVPAARYFQH

SEQ ID NO: 3813 - protein, 9 aa, Homo sapiens
  Light chain CDR3 for antibody 1907 (IGKV1-12)
QQANSFPIT

SEQ ID NO: 3814 - protein, 11 aa, Homo sapiens
  Heavy chain CDR3 for antibody 1907 (IGHV3-53)
ARDLGPRGIDY

SEQ ID NO: 3815 - protein, 9 aa, Homo sapiens
  Light chain CDR3 for antibody 1908 (IGKV1-13)
QHFNTYLLT

SEQ ID NO: 3816 - protein, 19 aa, Homo sapiens
  Heavy chain CDR3 for antibody 1908 (IGHV5-51)
ARRMARGILEGRGRGAYDV

SEQ ID NO: 3817 - protein, 9 aa, Homo sapiens
  Light chain CDR3 for antibody 1909 (IGKV3-20)
QQYGSSPYT

SEQ ID NO: 3818 - protein, 11 aa, Homo sapiens
  Heavy chain CDR3 for antibody 1909 (IGHV3-53)
ARDLGPRGIDY

SEQ ID NO: 3819 - protein, 9 aa, Homo sapiens
  Light chain CDR3 for antibody 1910 (IGKV1-5)
QQYNSYSWT

SEQ ID NO: 3820 - protein, 14 aa, Homo sapiens
  Heavy chain CDR3 for antibody 1910 (IGHV1-69)
ARMYSGYYYYGMDV

SEQ ID NO: 3821 - protein, 9 aa, Homo sapiens
  Light chain CDR3 for antibody 1911 (IGKV1-33)
QQYDNLPLT

SEQ ID NO: 3822 - protein, 15 aa, Homo sapiens
  Heavy chain CDR3 for antibody 1911 (IGHV1-69)
ARSVLQLERRYAFDI

SEQ ID NO: 3823 - protein, 10 aa, Homo sapiens
  Light chain CDR3 for antibody 1912 (IGKV1-39)
QQSYSTLIFT

SEQ ID NO: 3824 - protein, 16 aa, Homo sapiens
  Heavy chain CDR3 for antibody 1912 (IGHV1-69)
ARVRSGSYGRLYYFDY

SEQ ID NO: 3825 - protein, 9 aa, Homo sapiens
  Light chain CDR3 for antibody 1913 (IGKV1-12)
QQANSFPYT

SEQ ID NO: 3826 - protein, 15 aa, Homo sapiens
  Heavy chain CDR3 for antibody 1913 (IGHV1-46)
ARAWDYGDYEGWFDP

SEQ ID NO: 3827 - protein, 10 aa, Homo sapiens
  Light chain CDR3 for antibody 1914 (IGKV1-33)
QQYDNLPSLT

SEQ ID NO: 3828 - protein, 15 aa, Homo sapiens
  Heavy chain CDR3 for antibody 1914 (IGHV3-48)
VRDHMSGQQLLRPDC

SEQ ID NO: 3829 - protein, 9 aa, Homo sapiens
  Light chain CDR3 for antibody 1915 (IGKV1-33)
QQSYSTPRT

SEQ ID NO: 3830 - protein, 20 aa, Homo sapiens
  Heavy chain CDR3 for antibody 1915 (IGHV4-30-2)
ARLPYYDFWSGYWTDSTGDY

SEQ ID NO: 3831 - protein, 9 aa, Homo sapiens
  Light chain CDR3 for antibody 1916 (IGKV1-39)
QQSYSTPQT

SEQ ID NO: 3832 - protein, 14 aa, Homo sapiens
  Heavy chain CDR3 for antibody 1916 (IGHV1-46)
ARVVAVAGYNWFDP

SEQ ID NO: 3833 - protein, 9 aa, Homo sapiens
  Light chain CDR3 for antibody 1917 (IGKV1-39)
QQSHSTPYT

SEQ ID NO: 3834 - protein, 10 aa, Homo sapiens
  Heavy chain CDR3 for antibody 1917 (IGHV4-28)
ATGDRVSVDY

SEQ ID NO: 3835 - protein, 8 aa, Homo sapiens
  Light chain CDR3 for antibody 1918 (IGKV2D-28)
MQALQTPL

SEQ ID NO: 3836 - protein, 23 aa, Homo sapiens
  Heavy chain CDR3 for antibody 1918 (IGHV3-11)
ARTTYYDFWSGYWDPNYYYYMDV

SEQ ID NO: 3837 - protein, 9 aa, Homo sapiens
  Light chain CDR3 for antibody 1919 (IGKV1-9)
QQLNSYPPL

SEQ ID NO: 3838 - protein, 20 aa, Homo sapiens
  Heavy chain CDR3 for antibody 1919 (IGHV2-26)
ARIGRERLIFGVVYYYYMDV

SEQ ID NO: 3839 - protein, 9 aa, Homo sapiens
  Light chain CDR3 for antibody 1920 (IGKV1-33)
QQYDNLPLT

SEQ ID NO: 3840 - protein, 15 aa, Homo sapiens
  Heavy chain CDR3 for antibody 1920 (IGHV1-46)
ARDSEVVPAARYFQH

SEQ ID NO: 3841 - protein, 9 aa, Homo sapiens
  Light chain CDR3 for antibody 1921 (IGKV1-5)
QQYNSYSWT

SEQ ID NO: 3842 - protein, 11 aa, Homo sapiens
  Heavy chain CDR3 for antibody 1921 (IGHV1-69)
ARENYGGACDY

SEQ ID NO: 3843 - protein, 9 aa, Homo sapiens
  Light chain CDR3 for antibody 1922 (IGKV1-39)
QQSYTTPRT

SEQ ID NO: 3844 - protein, 12 aa, Homo sapiens
  Heavy chain CDR3 for antibody 1922 (IGHV4-4)
AREEAMGRGLDV

SEQ ID NO: 3845 - protein, 8 aa, Homo sapiens
  Light chain CDR3 for antibody 1923 (IGKV1-5)
QQYNSYNT

SEQ ID NO: 3846 - protein, 13 aa, Homo sapiens
  Heavy chain CDR3 for antibody 1923 (IGHV3-64)
ARDWGQVTTWFDP

SEQ ID NO: 3847 - protein, 9 aa, Homo sapiens
  Light chain CDR3 for antibody 1924 (IGKV3-15)
QHYNDWQYS

SEQ ID NO: 3848 - protein, 11 aa, Homo sapiens
  Heavy chain CDR3 for antibody 1924 (IGHV4-59)
AAYDFWSSFDP

SEQ ID NO: 3849 - protein, 10 aa, Homo sapiens
  Light chain CDR3 for antibody 1925 (IGKV3-11)
QQRSIWPGYT

SEQ ID NO: 3850 - protein, 15 aa, Homo sapiens
  Heavy chain CDR3 for antibody 1925 (IGHV1-46)
ARDSEVVPAARYFHH

SEQ ID NO: 3851 - protein, 6 aa, Homo sapiens
  Light chain CDR3 for antibody 1926 (IGKV1-33)
QQNEGA

SEQ ID NO: 3852 - protein, 15 aa, Homo sapiens
  Heavy chain CDR3 for antibody 1926 (IGHV1-46)
ARDSEVVPAARYFQH

SEQ ID NO: 3853 - protein, 10 aa, Homo sapiens [sequence omitted]

SEQ ID NO: 3854 - protein, 21 aa, Homo sapiens
  Heavy chain CDR3 for antibody 1927 (IGHV3-33)
AKAGGGSYCGGGSCYSGYFDY

SEQ ID NO: 3855 - protein, 8 aa, Homo sapiens
  Light chain CDR3 for antibody 1928 (IGKV3-11)
QQRSNWLT

SEQ ID NO: 3856 - protein, 17 aa, Homo sapiens
  Heavy chain CDR3 for antibody 1928 (IGHV4-39)
ARPSSPTPTTVYWYFDL

SEQ ID NO: 3857 - protein, 9 aa, Homo sapiens
  Light chain CDR3 for antibody 1929 (IGKV1-12)
QQANSFPIT

SEQ ID NO: 3858 - protein, 13 aa, Homo sapiens
  Heavy chain CDR3 for antibody 1929 (IGHV3-64)
ARDWGQVTTWFDP

SEQ ID NO: 3859 - protein, 10 aa, Homo sapiens
  Light chain CDR3 for antibody 1930 (IGKV1-5)
QQYKSNDPYT

SEQ ID NO: 3860 - protein, 13 aa, Homo sapiens
  Heavy chain CDR3 for antibody 1930 (IGHV4-39)
ARVPLTDFYYFDY

SEQ ID NO: 3861 - protein, 9 aa, Homo sapiens
  Light chain CDR3 for antibody 1931 (IGKV1-27)
QNYYSAPET

SEQ ID NO: 3862 - protein, 8 aa, Homo sapiens
  Heavy chain CDR3 for antibody 1931 (IGHV3-53)
ATHPDHAY

SEQ ID NO: 3863 - protein, 9 aa, Homo sapiens
  Light chain CDR3 for antibody 1932 (IGKV1-9)
QQLNSYPPL

SEQ ID NO: 3864 - protein, 26 aa, Homo sapiens
  Heavy chain CDR3 for antibody 1932 (IGHV1-46)
AREGNVDYDFWSGYSRPRYYYYYMDV

SEQ ID NO: 3865 - protein, 9 aa, Homo sapiens
  Light chain CDR3 for antibody 1933 (IGKV3-20)
QQYGSSRGT

SEQ ID NO: 3866 - protein, 13 aa, Homo sapiens
  Heavy chain CDR3 for antibody 1933 (IGHV5-51)
ARPTYGAKWGLDY

SEQ ID NO: 3867 - protein, 10 aa, Homo sapiens
  Light chain CDR3 for antibody 1934 (IGKV1-5)
QQYKSNDPYT

SEQ ID NO: 3868 - protein, 15 aa, Homo sapiens
  Heavy chain CDR3 for antibody 1934 (IGHV1-69)
ARSVLQLERRYAFDI

SEQ ID NO: 3869 - protein, 9 aa, Homo sapiens
  Light chain CDR3 for antibody 1935 (IGKV1-9)
QQLNSYPPL

SEQ ID NO: 3870 - protein, 10 aa, Homo sapiens
  Heavy chain CDR3 for antibody 1935 (IGHV4-28)
ATGDRVSVDY

SEQ ID NO: 3871 - protein, 10 aa, Homo sapiens
  Light chain CDR3 for antibody 1936 (IGKV2-30)
MQGTHWPPWT

SEQ ID NO: 3872 - protein, 22 aa, Homo sapiens
  Heavy chain CDR3 for antibody 1936 (IGHV3-11)
ARGETSSTSSARARYYYYYMDV

SEQ ID NO: 3873 - protein, 9 aa, Homo sapiens
  Light chain CDR3 for antibody 1937 (IGKV1-12)
QQANSFPIT

SEQ ID NO: 3874 - protein, 16 aa, Homo sapiens
  Heavy chain CDR3 for antibody 1937 (IGHV3-13)
ARGITTAAGLKYYFDY

SEQ ID NO: 3875 - protein, 10 aa, Homo sapiens
  Light chain CDR3 for antibody 1938 (IGKV3-20)
QQYGSSPLFT

SEQ ID NO: 3876 - protein, 16 aa, Homo sapiens
  Heavy chain CDR3 for antibody 1938 (IGHV1-69)
ARSDSADWELPGAFDI

SEQ ID NO: 3877 - protein, 8 aa, Homo sapiens
  Light chain CDR3 for antibody 1939 (IGKV6-21)
HQTSSVYT

SEQ ID NO: 3878 - protein, 11 aa, Homo sapiens
  Heavy chain CDR3 for antibody 1939 (IGHV3-53)
ARDLGPREIDY

SEQ ID NO: 3879 - protein, 9 aa, Homo sapiens
  Light chain CDR3 for antibody 1940 (IGKV1-17)
LQHKSYPLT

SEQ ID NO: 3880 - protein, 18 aa, Homo sapiens
  Heavy chain CDR3 for antibody 1940 (IGHV1-18)
ARDSGYGGYDYWEPPLDY

SEQ ID NO: 3881 - protein, 10 aa, Homo sapiens
  Light chain CDR3 for antibody 1941 (IGKV3-20)
QQHGSSLTWT

SEQ ID NO: 3882 - protein, 15 aa, Homo sapiens
  Heavy chain CDR3 for antibody 1941 (IGHV3-30)
AREGPWWEIRAASDS

SEQ ID NO: 3883 - protein, 8 aa, Homo sapiens
  Light chain CDR3 for antibody 1942 (IGKV1-5)
QQYKSYWT

SEQ ID NO: 3884 - protein, 15 aa, Homo sapiens
  Heavy chain CDR3 for antibody 1942 (IGHV1-46)
ARDSEVVPAARYFQH

SEQ ID NO: 3885 - protein, 9 aa, Homo sapiens
  Light chain CDR3 for antibody 1943 (IGKV1-39)
QQSDSTPRT

SEQ ID NO: 3886 - protein, 18 aa, Homo sapiens
  Heavy chain CDR3 for antibody 1943 (IGHV1-18)
ARDSGYGGCDYWEAALDY

SEQ ID NO: 3887 - protein, 9 aa, Homo sapiens
  Light chain CDR3 for antibody 1944 (IGKV1-5)
QQYNSYPLT

SEQ ID NO: 3888 - protein, 22 aa, Homo sapiens
  Heavy chain CDR3 for antibody 1944 (IGHV3-13)
ARGETSSTSSARARYYYYYMDV

SEQ ID NO: 3889 - protein, 8 aa, Homo sapiens
  Light chain CDR3 for antibody 1945 (IGKV6-21)
HQTSSVYT

SEQ ID NO: 3890 - protein, 13 aa, Homo sapiens
  Heavy chain CDR3 for antibody 1945 (IGHV4-30-2)
ASSVDTAMGDFYY

SEQ ID NO: 3891 - protein, 9 aa, Homo sapiens
  Light chain CDR3 for antibody 1946 (IGKV1-39)
QQSDSTPRT

SEQ ID NO: 3892 - protein, 18 aa, Homo sapiens
  Heavy chain CDR3 for antibody 1946 (IGHV1-18)
ARDSGYGGCEYGEPPLDY

SEQ ID NO: 3893 - protein, 9 aa, Homo sapiens
  Light chain CDR3 for antibody 1947 (IGKV1-39)
QQSHSTPYT

SEQ ID NO: 3894 - protein, 18 aa, Homo sapiens
  Heavy chain CDR3 for antibody 1947 (IGHV1-18)
ARDSGYGRYDYWEPPLDY

SEQ ID NO: 3895 - protein, 9 aa, Homo sapiens
  Light chain CDR3 for antibody 1948 (IGKV1-39)
QQSDSTPYT

SEQ ID NO: 3896 - protein, 13 aa, Homo sapiens
  Heavy chain CDR3 for antibody 1948 (IGHV4-31)
ATPGESDSDAFDI

SEQ ID NO: 3897 - protein, 9 aa, Homo sapiens
  Light chain CDR3 for antibody 1949 (IGKV1-39)
QQSYSIPFT

SEQ ID NO: 3898 - protein, 16 aa, Homo sapiens
  Heavy chain CDR3 for antibody 1949 (IGHV3-23)
AKDVPDTAMLSGWFDP

SEQ ID NO: 3899 - protein, 10 aa, Homo sapiens
  Light chain CDR3 for antibody 1950 (IGKV3-20)
QQYGSSPPIT

SEQ ID NO: 3900 - protein, 15 aa, Homo sapiens
  Heavy chain CDR3 for antibody 1950 (IGHV1-46)
ARDSEVVPAARYFQH

SEQ ID NO: 3901 - protein, 9 aa, Homo sapiens
  Light chain CDR3 for antibody 1951 (IGKV1-39)
QQSDSTPRT

SEQ ID NO: 3902 - protein, 15 aa, Homo sapiens
  Heavy chain CDR3 for antibody 1951 (IGHV1-18)
ARAWDYGDYEGWFDP

SEQ ID NO: 3903 - protein, 9 aa, Homo sapiens
  Light chain CDR3 for antibody 1952 (IGKV3-11)
QQRSNWPIT

SEQ ID NO: 3904 - protein, 14 aa, Homo sapiens
  Heavy chain CDR3 for antibody 1952 (IGHV2-70)
ARTPIAAAGSPFDP

SEQ ID NO: 3905 - protein, 9 aa, Homo sapiens
  Light chain CDR3 for antibody 1953 (IGKV1-16)
QQYHSYPFT

SEQ ID NO: 3906 - protein, 17 aa, Homo sapiens
  Heavy chain CDR3 for antibody 1953 (IGHV5-51)
ARPRPEDYYASHWYFDL

SEQ ID NO: 3907 - protein, 8 aa, Homo sapiens
  Light chain CDR3 for antibody 1954 (IGKV1-5)
QQYKSYWT

SEQ ID NO: 3908 - protein, 15 aa, Homo sapiens
  Heavy chain CDR3 for antibody 1954 (IGHV3-48)
ARVSPGIVGALHTDY

SEQ ID NO: 3909 - protein, 9 aa, Homo sapiens
  Light chain CDR3 for antibody 1955 (IGKV1-33)
QQYDNLPLT

SEQ ID NO: 3910 - protein, 13 aa, Homo sapiens
  Heavy chain CDR3 for antibody 1955 (IGHV3-64)
ARDWGQVTTWFDP

SEQ ID NO: 3911 - protein, 8 aa, Homo sapiens
  Light chain CDR3 for antibody 1956 (IGKV1-5)
QQYNSYNT

SEQ ID NO: 3912 - protein, 21 aa, Homo sapiens
  Heavy chain CDR3 for antibody 1956 (IGHV3-33)
AKAGGGSYCGGGSCYSGYFDY

SEQ ID NO: 3913 - protein, 10 aa, Homo sapiens
  Light chain CDR3 for antibody 1957 (IGKV3-15)
HQYNKWPPFT

SEQ ID NO: 3914 - protein, 14 aa, Homo sapiens
  Heavy chain CDR3 for antibody 1957 (IGHV2-70)
ARTPIAAAGSPFDP

SEQ ID NO: 3915 - protein, 9 aa, Homo sapiens
  Light chain CDR3 for antibody 1958 (IGKV1-39)
QQSYSTPYT

SEQ ID NO: 3916 - protein, 19 aa, Homo sapiens
  Heavy chain CDR3 for antibody 1958 (IGHV4-61)
ASHTKRITIFGVVTDYFDY

SEQ ID NO: 3917 - protein, 6 aa, Homo sapiens
  Light chain CDR3 for antibody 1959 (IGKV1-33)
QQNEGA

SEQ ID NO: 3918 - protein, 14 aa, Homo sapiens
  Heavy chain CDR3 for antibody 1959 (IGHV2-70)
ARTPIAAAGSPFDP

SEQ ID NO: 3919 - protein, 9 aa, Homo sapiens
  Light chain CDR3 for antibody 1960 (IGKV1-13)
QHFNTYFLT

SEQ ID NO: 3920 - protein, 11 aa, Homo sapiens
  Heavy chain CDR3 for antibody 1960 (IGHV3-53)
ARDLGPRGIDY

SEQ ID NO: 3921 - protein, 9 aa, Homo sapiens
  Light chain CDR3 for antibody 1961 (IGKV1-13)
QQYSTYPLT

SEQ ID NO: 3922 - protein, 14 aa, Homo sapiens
  Heavy chain CDR3 for antibody 1961 (IGHV2-70)
ARTPIAAAGSPFDP

SEQ ID NO: 3923 - protein, 10 aa, Homo sapiens
  Light chain CDR3 for antibody 1962 (IGKV3-11)
QQRSIWLGYT

SEQ ID NO: 3924 - protein, 15 aa, Homo sapiens
  Heavy chain CDR3 for antibody 1962 (IGHV1-46)
ASDSEGVPAARYFEH

SEQ ID NO: 3925 - protein, 9 aa, Homo sapiens
  Light chain CDR3 for antibody 1963 (IGKV1-39)
QQSYSTPYT

SEQ ID NO: 3926 - protein, 17 aa, Homo sapiens
  Heavy chain CDR3 for antibody 1963 (IGHV1-24)
AAEGIVGATVSYYGMDV

SEQ ID NO: 3927 - protein, 9 aa, Homo sapiens
  Light chain CDR3 for antibody 1964 (IGKV1-39)
QQSDSTPRT

SEQ ID NO: 3928 - protein, 18 aa, Homo sapiens
  Heavy chain CDR3 for antibody 1964 (IGHV1-18)
ARYSGYGGDEYWDPPLDY

SEQ ID NO: 3929 - protein, 10 aa, Homo sapiens
  Light chain CDR3 for antibody 1965 (IGKV3-20)
QQYGSSPPIT

SEQ ID NO: 3930 - protein, 14 aa, Homo sapiens
  Heavy chain CDR3 for antibody 1965 (IGHV2-70)
ARTPIAAAGSPFDP

SEQ ID NO: 3931 - protein, 10 aa, Homo sapiens
  Light chain CDR3 for antibody 1966 (IGKV3-11)
QQRSIWLGYT

SEQ ID NO: 3932 - protein, 21 aa, Homo sapiens
  Heavy chain CDR3 for antibody 1966 (IGHV1-8)
ARGGWGSGGWYGKYFYYGMDV

SEQ ID NO: 3933 - protein, 9 aa, Homo sapiens
  Light chain CDR3 for antibody 1967 (IGKV1-33)
QQYSNLPRT

SEQ ID NO: 3934 - protein, 9 aa, Homo sapiens
  Heavy chain CDR3 for antibody 1967 (IGHV4-59)
VRGRNNFRY

SEQ ID NO: 3935 - protein, 8 aa, Homo sapiens
  Light chain CDR3 for antibody 1968 (IGKV1-9)
QQSYSTLT

SEQ ID NO: 3936 - protein, 15 aa, Homo sapiens
  Heavy chain CDR3 for antibody 1968 (IGHV1-69)
ARAVLQLERRYAFDI

SEQ ID NO: 3937 - protein, 9 aa, Homo sapiens
  Light chain CDR3 for antibody 1969 (IGKV1-5)
QQYNSYSWT

SEQ ID NO: 3938 - protein, 20 aa, Homo sapiens
  Heavy chain CDR3 for antibody 1969 (IGHV3-33)
AKSGGTYCSGGNCYGYYFDY

SEQ ID NO: 3939 - protein, 9 aa, Homo sapiens
  Light chain CDR3 for antibody 1970 (IGKV1-33)
QQSYSTPRT

SEQ ID NO: 3940 - protein, 18 aa, Homo sapiens
  Heavy chain CDR3 for antibody 1970 (IGHV1-18)
ATDSGYGGYDYWEPPIDY

SEQ ID NO: 3941 - protein, 9 aa, Homo sapiens
  Light chain CDR3 for antibody 1971 (IGKV1-13)
QHFNTYFLT

SEQ ID NO: 3942 - protein, 15 aa, Homo sapiens
  Heavy chain CDR3 for antibody 1971 (IGHV1-69)
ARSVLQLERRYAFDI

SEQ ID NO: 3943 - protein, 9 aa, Homo sapiens
  Light chain CDR3 for antibody 1972 (IGKV1-33)
QQYDNLPLT

SEQ ID NO: 3944 - protein, 20 aa, Homo sapiens
  Heavy chain CDR3 for antibody 1972 (IGHV3-33)
AKSGGTYCSGGNCYGYYFDY

SEQ ID NO: 3945 - protein, 9 aa, Homo sapiens
  Light chain CDR3 for antibody 1973 (IGKV1-5)
QQYNSYSWT

SEQ ID NO: 3946 - protein, 21 aa, Homo sapiens
  Heavy chain CDR3 for antibody 1973 (IGHV1-8)
ARGGWGSGGWYGKYFYYGMDV

SEQ ID NO: 3947 - protein, 10 aa, Homo sapiens
  Light chain CDR3 for antibody 1974 (IGKV1-39)
QQSYSTPPWT

SEQ ID NO: 3948 - protein, 21 aa, Homo sapiens
  Heavy chain CDR3 for antibody 1974 (IGHV1-8)
ARGGWGSGGWYGKYFYYGMDV

SEQ ID NO: 3949 - protein, 9 aa, Homo sapiens
  Light chain CDR3 for antibody 1975 (IGKV1-9)
QQLNSYPPL

SEQ ID NO: 3950 - protein, 11 aa, Homo sapiens
  Heavy chain CDR3 for antibody 1975 (IGHV3-53)
ARENYGGACDY

SEQ ID NO: 3951 - protein, 8 aa, Homo sapiens
  Light chain CDR3 for antibody 1976 (IGKV1-5)
QQYNSYNT

SEQ ID NO: 3952 - protein, 18 aa, Homo sapiens
  Heavy chain CDR3 for antibody 1976 (IGHV1-18)
ARDSGYGGYDYWEPPLDY

SEQ ID NO: 3953 - protein, 9 aa, Homo sapiens
  Light chain CDR3 for antibody 1977 (IGKV3-11)
QQRSNWPLS

SEQ ID NO: 3954 - protein, 18 aa, Homo sapiens
  Heavy chain CDR3 for antibody 1977 (IGHV1-18)
ARDSGYGGYDYWEPPLDY

SEQ ID NO: 3955 - protein, 10 aa, Homo sapiens
  Light chain CDR3 for antibody 1978 (IGKV3-11)
QQRSIWLGYT

SEQ ID NO: 3956 - protein, 16 aa, Homo sapiens
  Heavy chain CDR3 for antibody 1978 (IGHV3-13)
ARGITTAAGLKYYFDY

SEQ ID NO: 3957 - protein, 9 aa, Homo sapiens
  Light chain CDR3 for antibody 1979 (IGKV1-39)
QQSYSSHWT

SEQ ID NO: 3958 - protein, 21 aa, Homo sapiens
  Heavy chain CDR3 for antibody 1979 (IGHV3-13)
AKAGGGSYCGGGSCYSGYFDY

SEQ ID NO: 3959 - protein, 8 aa, Homo sapiens
  Light chain CDR3 for antibody 1980 (IGKV1-5)
QQYNSYNT

SEQ ID NO: 3960 - protein, 15 aa, Homo sapiens
  Heavy chain CDR3 for antibody 1980 (IGHV1-69)
ARSVLQLERRYAFDI

SEQ ID NO: 3961 - protein, 9 aa, Homo sapiens
  Light chain CDR3 for antibody 1981 (IGKV1-17)
LQHNSYPLT

SEQ ID NO: 3962 - protein, 13 aa, Homo sapiens
  Heavy chain CDR3 for antibody 1981 (IGHV3-21)
TRSYWTGYNWFDP

SEQ ID NO: 3963 - protein, 9 aa, Homo sapiens
  Light chain CDR3 for antibody 1982 (IGKV3-11)
QQRSNWPIT

SEQ ID NO: 3964 - protein, 11 aa, Homo sapiens
  Heavy chain CDR3 for antibody 1982 (IGHV3-53)
ARDLGPRGIDY

SEQ ID NO: 3965 - protein, 10 aa, Homo sapiens
  Light chain CDR3 for antibody 1983 (IGKV1-33)
QQYDNLPPYT

SEQ ID NO: 3966 - protein, 16 aa, Homo sapiens
  Heavy chain CDR3 for antibody 1983 (IGHV3-30)
AKHGYSYGYWLGYFDY

SEQ ID NO: 3967 - protein, 9 aa, Homo sapiens
  Light chain CDR3 for antibody 1984 (IGKV1-33)
QQYDNLPRT

SEQ ID NO: 3968 - protein, 12 aa, Homo sapiens
  Heavy chain CDR3 for antibody 1984 (IGHV3-66)
ARDCLGIPSMDV

SEQ ID NO: 3969 - protein, 9 aa, Homo sapiens
  Light chain CDR3 for antibody 1985 (IGKV1-6)
LQDYNYPRT

SEQ ID NO: 3970 - protein, 10 aa, Homo sapiens
  Heavy chain CDR3 for antibody 1985 (IGHV3-53)
ARDLASGEGP

SEQ ID NO: 3971 - protein, 11 aa, Homo sapiens
  Light chain CDR3 for antibody 1986 (IGKV1-9)
QQLNSYPPGDT

SEQ ID NO: 3972 - protein, 12 aa, Homo sapiens
  Heavy chain CDR3 for antibody 1986 (IGHV3-53)
ARDLGYAGGLDY

SEQ ID NO: 3973 - protein, 6 aa, Homo sapiens
  Light chain CDR3 for antibody 1987 (IGKV3-20)
QQSTYT

SEQ ID NO: 3974 - protein, 11 aa, Homo sapiens
  Heavy chain CDR3 for antibody 1987 (IGHV3-53)
ARAYGDYYFDY

SEQ ID NO: 3975 - protein, 9 aa, Homo sapiens
  Light chain CDR3 for antibody 1988 (IGKV1-13)
QQFNSYPRT

SEQ ID NO: 3976 - protein, 11 aa, Homo sapiens
  Heavy chain CDR3 for antibody 1988 (IGHV3-66)
ARDWGDYYFDY

SEQ ID NO: 3977 - protein, 9 aa, Homo sapiens
  Light chain CDR3 for antibody 1989 (IGKV1-6)
LQNKDAAWT

SEQ ID NO: 3978 - protein, 16 aa, Homo sapiens
  Heavy chain CDR3 for antibody 1989 (IGHV1-2)
ARGDVVDPGVALVLDV

SEQ ID NO: 3979 - protein, 10 aa, Homo sapiens
  Light chain CDR3 for antibody 1990 (IGKV1-39)
QQSYSTPPFT

SEQ ID NO: 3980 - protein, 14 aa, Homo sapiens
  Heavy chain CDR3 for antibody 1990 (IGHV3-66)
ARVEFYGGKGAFDI

SEQ ID NO: 3981 - protein, 9 aa, Homo sapiens
  Light chain CDR3 for antibody 1991 (IGKV1-33)
QQYDNLPRT

SEQ ID NO: 3982 - protein, 16 aa, Homo sapiens
  Heavy chain CDR3 for antibody 1991 (IGHV3-30)
AKHGYSYGYWLGYFDY

SEQ ID NO: 3983 - protein, 9 aa, Homo sapiens
  Light chain CDR3 for antibody 1992 (IGKV1-33)
QQYDNLPFT

SEQ ID NO: 3984 - protein, 19 aa, Homo sapiens
  Heavy chain CDR3 for antibody 1992 (IGHV3-33)
ARDGQGIAAAGTISSAFDI

SEQ ID NO: 3985 - protein, 10 aa, Homo sapiens
  Light chain CDR3 for antibody 1993 (IGKV1-33)
QQYDNLPPYT

SEQ ID NO: 3986 - protein, 12 aa, Homo sapiens
  Heavy chain CDR3 for antibody 1993 (IGHV3-66)
ARDCLGIPSMDV

SEQ ID NO: 3987 - protein, 8 aa, Homo sapiens
  Light chain CDR3 for antibody 1994 (IGKV3-20)
QQYGSSPP

SEQ ID NO: 3988 - protein, 22 aa, Homo sapiens
  Heavy chain CDR3 for antibody 1994 (IGHV1-69)
ARGGWGTSSSWGPSYYYYYMDV

SEQ ID NO: 3989 - protein, 11 aa, Homo sapiens
  Light chain CDR3 for antibody 1995 (IGKV1-9)
QQLNSYPPGDT

SEQ ID NO: 3990 - protein, 16 aa, Homo sapiens
  Heavy chain CDR3 for antibody 1995 (IGHV3-30)
AKHGYSYGYWLGYFDY

SEQ ID NO: 3991 - protein, 9 aa, Homo sapiens
  Light chain CDR3 for antibody 1996 (IGKV3-20)
QQYGSSPRT

SEQ ID NO: 3992 - protein, 15 aa, Homo sapiens
  Heavy chain CDR3 for antibody 1996 (IGHV4-61)
ASSWGYGSGSYYSDY

SEQ ID NO: 3993 - protein, 9 aa, Homo sapiens
  Light chain CDR3 for antibody 1997 (IGKV1-6)
LQDYNYPRT

SEQ ID NO: 3994 - protein, 16 aa, Homo sapiens
  Heavy chain CDR3 for antibody 1997 (IGHV3-30)
AKHGYSYGYWLGYFDY

SEQ ID NO: 3995 - protein, 10 aa, Homo sapiens
  Light chain CDR3 for antibody 1998 (IGKV1-33)
QQYDNLPPYT

SEQ ID NO: 3996 - protein, 12 aa, Homo sapiens
  Heavy chain CDR3 for antibody 1998 (IGHV3-53)
ARDLGYAGGLDY

SEQ ID NO: 3997 - protein, 9 aa, Homo sapiens
  Light chain CDR3 for antibody 1999 (IGKV1-33)
QQYDNLPRT

SEQ ID NO: 3998 - protein, 10 aa, Homo sapiens
  Heavy chain CDR3 for antibody 1999 (IGHV3-53)
ARDLASGEGP

SEQ ID NO: 3999 - protein, 6 aa, Homo sapiens
  Light chain CDR3 for antibody 2000 (IGKV3-20)
QQSTYT

SEQ ID NO: 4000 - protein, 16 aa, Homo sapiens
  Heavy chain CDR3 for antibody 2000 (IGHV3-30)
AKHGYSYGYWLGYFDY

SEQ ID NO: 4001 - protein, 10 aa, Homo sapiens
  Light chain CDR3 for antibody 2001 (IGKV1-33)
QQYDNLPPYT

SEQ ID NO: 4002 - protein, 10 aa, Homo sapiens
  Heavy chain CDR3 for antibody 2001 (IGHV3-53)
ARDLASGEGP

SEQ ID NO: 4003 - protein, 10 aa, Homo sapiens
  Light chain CDR3 for antibody 2002 (IGKV1-33)
QQYDNLPPYT

SEQ ID NO: 4004 - protein, 11 aa, Homo sapiens
  Heavy chain CDR3 for antibody 2002 (IGHV3-53)
ARAYGDYYFDY

SEQ ID NO: 4005 - protein, 9 aa, Homo sapiens
  Light chain CDR3 for antibody 2003 (IGKV1-33)
QQYDNLPRT

SEQ ID NO: 4006 - protein, 12 aa, Homo sapiens
  Heavy chain CDR3 for antibody 2003 (IGHV3-53)
ARDLGYAGGLDY

SEQ ID NO: 4007 - protein, 10 aa, Homo sapiens
  Light chain CDR3 for antibody 2004 (IGKV1-9)
QQLNSYPPYT

SEQ ID NO: 4008 - protein, 12 aa, Homo sapiens
  Heavy chain CDR3 for antibody 2004 (IGHV3-53)
ARDLGYAGGLDY

SEQ ID NO: 4009 - protein, 10 aa, Homo sapiens
  Light chain CDR3 for antibody 2005 (IGKV1-33)
QQYDNLLLLT

SEQ ID NO: 4010 - protein, 18 aa, Homo sapiens
  Heavy chain CDR3 for antibody 2005 (IGHV3-11)
ATPRGYGSGWYVLWAFDI

SEQ ID NO: 4011 - protein, 9 aa, Homo sapiens
  Light chain CDR3 for antibody 2006 (IGKV1-33)
QQYDNLPRT

SEQ ID NO: 4012 - protein, 11 aa, Homo sapiens
  Heavy chain CDR3 for antibody 2006 (IGHV3-53)
ARAYGDYYFDY

SEQ ID NO: 4013 - protein, 9 aa, Homo sapiens
  Light chain CDR3 for antibody 2007 (IGKV1-6)
LQDYNYPRT

SEQ ID NO: 4014 - protein, 12 aa, Homo sapiens
  Heavy chain CDR3 for antibody 2007 (IGHV3-66)
ARDCLGIPSMDV

SEQ ID NO: 4015 - protein, 11 aa, Homo sapiens
  Light chain CDR3 for antibody 2008 (IGKV1-9)
QQLNSYPPGDT

SEQ ID NO: 4016 - protein, 12 aa, Homo sapiens
  Heavy chain CDR3 for antibody 2008 (IGHV3-66)
ARDCLGIPSMDV

SEQ ID NO: 4017 - protein, 8 aa, Homo sapiens
  Light chain CDR3 for antibody 2009 (IGKV4-1)
QQYYSTRT

SEQ ID NO: 4018 - protein, 17 aa, Homo sapiens
  Heavy chain CDR3 for antibody 2009 (IGHV4-31)
ASSRGGDYGDYSGPFDY

SEQ ID NO: 4019 - protein, 9 aa, Homo sapiens
  Light chain CDR3 for antibody 2010 (IGKV1-6)
LQDYNYPRT

SEQ ID NO: 4020 - protein, 12 aa, Homo sapiens
  Heavy chain CDR3 for antibody 2010 (IGHV3-53)
ARDLGYAGGLDY

SEQ ID NO: 4021 - protein, 11 aa, Homo sapiens
  Light chain CDR3 for antibody 2011 (IGKV1-9)
QQLNSYPPGDT

SEQ ID NO: 4022 - protein, 10 aa, Homo sapiens
  Heavy chain CDR3 for antibody 2011 (IGHV3-53)
ARDLASGEGP

SEQ ID NO: 4023 - protein, 6 aa, Homo sapiens
  Light chain CDR3 for antibody 2012 (IGKV3-20)
QQSTYT

SEQ ID NO: 4024 - protein, 12 aa, Homo sapiens
  Heavy chain CDR3 for antibody 2012 (IGHV3-66)
ARDCLGIPSMDV

SEQ ID NO: 4025 - protein, 9 aa, Homo sapiens
  Light chain CDR3 for antibody 2013 (IGKV1-6)
LQDYNYPRT

SEQ ID NO: 4026 - protein, 11 aa, Homo sapiens
  Heavy chain CDR3 for antibody 2013 (IGHV3-53)
ARAYGDYYFDY

SEQ ID NO: 4027 - protein, 8 aa, Homo sapiens
  Light chain CDR3 for antibody 2014 (IGKV3-20)
QQYGSSPP

SEQ ID NO: 4028 - protein, 12 aa, Homo sapiens
  Heavy chain CDR3 for antibody 2014 (IGHV1-69)
ARREIVVGAFDI

SEQ ID NO: 4029 - protein, 9 aa, Homo sapiens
  Light chain CDR3 for antibody 2015 (IGKV3-20)
QQYGSSPLT

SEQ ID NO: 4030 - protein, 12 aa, Homo sapiens
  Heavy chain CDR3 for antibody 2015 (IGHV2-5)
AHRRNFLGHFDY

SEQ ID NO: 4031 - protein, 6 aa, Homo sapiens
  Light chain CDR3 for antibody 2016 (IGKV3-20)
QQSTYT

SEQ ID NO: 4032 - protein, 12 aa, Homo sapiens
  Heavy chain CDR3 for antibody 2016 (IGHV3-53)
ARDLGYAGGLDY

SEQ ID NO: 4033 - protein, 8 aa, Homo sapiens
  Light chain CDR3 for antibody 2017 (IGKV2D-28)
MQALQTLT

SEQ ID NO: 4034 - protein, 18 aa, Homo sapiens
  Heavy chain CDR3 for antibody 2017 (IGHV5-51)
ARSMLPGYQLLYREGMDV

SEQ ID NO: 4035 - protein, 9 aa, Homo sapiens
  Light chain CDR3 for antibody 2018 (IGKV1-8)
QQYYSYPLT

SEQ ID NO: 4036 - protein, 20 aa, Homo sapiens
  Heavy chain CDR3 for antibody 2018 (IGHV5-a)
ARRGKQWLAGYYYYYYYMDV

SEQ ID NO: 4037 - protein, 9 aa, Homo sapiens
  Light chain CDR3 for antibody 2019 (IGKV3-20)
QQYGSSPWT

SEQ ID NO: 4038 - protein, 13 aa, Homo sapiens
  Heavy chain CDR3 for antibody 2019 (IGHV4-59)
ARVPGHSSGWHDY

SEQ ID NO: 4039 - protein, 11 aa, Homo sapiens
  Light chain CDR3 for antibody 2020 (IGKV1-9)
QQLNSYPPGDT

SEQ ID NO: 4040 - protein, 11 aa, Homo sapiens
  Heavy chain CDR3 for antibody 2020 (IGHV3-53)
ARAYGDYYFDY

SEQ ID NO: 4041 - protein, 6 aa, Homo sapiens
  Light chain CDR3 for antibody 2021 (IGKV3-20)
QQSTYT

SEQ ID NO: 4042 - protein, 10 aa, Homo sapiens
  Heavy chain CDR3 for antibody 2021 (IGHV3-53)
ARDLASGEGP

SEQ ID NO: 4043 - protein, 9 aa, Homo sapiens
  Light chain CDR3 for antibody 2022 (IGKV3-20)
QQYGSSPLT

SEQ ID NO: 4044 - protein, 22 aa, Homo sapiens
  Heavy chain CDR3 for antibody 2022 (IGHV1-69)
ARGGWGTSSSWGPSYYYYYMDV

SEQ ID NO: 4045 - protein, 9 aa, Homo sapiens
  Light chain CDR3 for antibody 2023 (IGKV3-11)
QQRSNWPKT

SEQ ID NO: 4046 - protein, 11 aa, Homo sapiens
  Heavy chain CDR3 for antibody 2023 (IGHV1-69)
ASRDTYNWFDP

SEQ ID NO: 4047 - protein, 8 aa, Homo sapiens
  Light chain CDR3 for antibody 2024 (IGKV1-33)
QQYHSLLT

SEQ ID NO: 4048 - protein, 11 aa, Homo sapiens
  Heavy chain CDR3 for antibody 2024 (IGHV4-61)
ALSYGSSIFDY

SEQ ID NO: 4049 - protein, 9 aa, Homo sapiens
  Light chain CDR3 for antibody 2025 (IGKV1-39)
QQSYSTPLT

SEQ ID NO: 4050 - protein, 22 aa, Homo sapiens
  Heavy chain CDR3 for antibody 2025 (IGHV3-74)
ARVVDTAMVDGINYYYYYGMDV

SEQ ID NO: 4051 - protein, 10 aa, Homo sapiens
  Light chain CDR3 for antibody 2026 (IGKV3-20)
QQYNNWLLYT

SEQ ID NO: 4052 - protein, 13 aa, Homo sapiens
  Heavy chain CDR3 for antibody 2026 (IGHV4-61)
ARDGPGEYYYFDY

SEQ ID NO: 4053 - protein, 9 aa, Homo sapiens
  Light chain CDR3 for antibody 2027 (IGKV3-20)
QQYGSSPWT

SEQ ID NO: 4054 - protein, 19 aa, Homo sapiens
  Heavy chain CDR3 for antibody 2027 (IGHV4-61)
ARERVGVQWPVYYYYGMDV

SEQ ID NO: 4055 - protein, 9 aa, Homo sapiens
  Light chain CDR3 for antibody 2028 (IGKV1-13)
QQFNSYPRT

SEQ ID NO: 4056 - protein, 16 aa, Homo sapiens
  Heavy chain CDR3 for antibody 2028 (IGHV3-30)
AKHGYSYGYWLGYFDY

SEQ ID NO: 4057 - protein, 10 aa, Homo sapiens
  Light chain CDR3 for antibody 2029 (IGKV1-16)
QQYNSYPLYT

SEQ ID NO: 4058 - protein, 18 aa, Homo sapiens
  Heavy chain CDR3 for antibody 2029 (IGHV5-a)
ARQFPCSSTSCPLGWFDP

SEQ ID NO: 4059 - protein, 9 aa, Homo sapiens
  Light chain CDR3 for antibody 2030 (IGKV2-30)
MQGTHWPPG

SEQ ID NO: 4060 - protein, 12 aa, Homo sapiens
  Heavy chain CDR3 for antibody 2030 (IGHV5-51)
ASTTTPEYPLDP

SEQ ID NO: 4061 - protein, 9 aa, Homo sapiens
  Light chain CDR3 for antibody 2031 (IGKV1-39)
QQSYSPPRT

SEQ ID NO: 4062 - protein, 12 aa, Homo sapiens
  Heavy chain CDR3 for antibody 2031 (IGHV1-46)
ARAPSDYYGMDV

SEQ ID NO: 4063 - protein, 9 aa, Homo sapiens
  Light chain CDR3 for antibody 2032 (IGKV1-39)
HQSYTSPRT

SEQ ID NO: 4064 - protein, 13 aa, Homo sapiens
  Heavy chain CDR3 for antibody 2032 (IGHV4/OR15-8)
ARELESDGRSFDR

SEQ ID NO: 4065 - protein, 10 aa, Homo sapiens
  Light chain CDR3 for antibody 2033 (IGKV1-33)
QQYDNLPPYT

SEQ ID NO: 4066 - protein, 14 aa, Homo sapiens
  Heavy chain CDR3 for antibody 2033 (IGHV3-66)
ARVEFYGGKGAFDI

SEQ ID NO: 4067 - protein, 10 aa, Homo sapiens
  Light chain CDR3 for antibody 2034 (IGKV1-39)
QQSYSTPPFT

SEQ ID NO: 4068 - protein, 16 aa, Homo sapiens
  Heavy chain CDR3 for antibody 2034 (IGHV3-30)
AKHGYSYGYWLGYFDY

SEQ ID NO: 4069 - protein, 10 aa, Homo sapiens
  Light chain CDR3 for antibody 2035 (IGKV3-15)
QQYNNWPPLT

SEQ ID NO: 4070 - protein, 22 aa, Homo sapiens
  Heavy chain CDR3 for antibody 2035 (IGHV4-39)
ARHRTNSITIFGVVTMNNWFDP

SEQ ID NO: 4071 - protein, 9 aa, Homo sapiens
  Light chain CDR3 for antibody 2036 (IGKV1-33)
QQYDNLPRT

SEQ ID NO: 4072 - protein, 14 aa, Homo sapiens
  Heavy chain CDR3 for antibody 2036 (IGHV3-66)
ARVEFYGGKGAFDI

SEQ ID NO: 4073 - protein, 7 aa, Homo sapiens
  Light chain CDR3 for antibody 2037 (IGKV3-20)
QQYGSSP

SEQ ID NO: 4074 - protein, 17 aa, Homo sapiens
  Heavy chain CDR3 for antibody 2037 (IGHV1-69)
ARKGYGLITMIVGPFDI

SEQ ID NO: 4075 - protein, 9 aa, Homo sapiens
  Light chain CDR3 for antibody 2038 (IGKV1-13)
QQFNSYPRT

SEQ ID NO: 4076 - protein, 12 aa, Homo sapiens
  Heavy chain CDR3 for antibody 2038 (IGHV3-66)
ARDCLGIPSMDV

SEQ ID NO: 4077 - protein, 8 aa, Homo sapiens
  Light chain CDR3 for antibody 2039 (IGKV4-1)
QQYYSTRT

SEQ ID NO: 4078 - protein, 16 aa, Homo sapiens
  Heavy chain CDR3 for antibody 2039 (IGHV1-18)
AREASDYYDSSGRLDI

SEQ ID NO: 4079 - protein, 8 aa, Homo sapiens
  Light chain CDR3 for antibody 2040 (IGKV1-5)
QQYNSYSG

SEQ ID NO: 4080 - protein, 24 aa, Homo sapiens
  Heavy chain CDR3 for antibody 2040 (IGHV4-34)
ARAEGRVVPAALGVAYYYYYYMDV

SEQ ID NO: 4081 - protein, 9 aa, Homo sapiens
  Light chain CDR3 for antibody 2041 (IGKV1-13)
QQFNSYPRT

SEQ ID NO: 4082 - protein, 10 aa, Homo sapiens
  Heavy chain CDR3 for antibody 2041 (IGHV3-53)
ARDLASGEGP

SEQ ID NO: 4083 - protein, 9 aa, Homo sapiens
  Light chain CDR3 for antibody 2042 (IGKV1-9)
QQLNSYPFT

SEQ ID NO: 4084 - protein, 18 aa, Homo sapiens
  Heavy chain CDR3 for antibody 2042 (IGHV1-46)
ARVTYGGNPGYYYYGMDV

SEQ ID NO: 4085 - protein, 10 aa, Homo sapiens
  Light chain CDR3 for antibody 2043 (IGKV1-33)
QQYDNLPPYT

SEQ ID NO: 4086 - protein, 19 aa, Homo sapiens
  Heavy chain CDR3 for antibody 2043 (IGHV3-33)
ARDGQGIAAAGTISSAFDI

SEQ ID NO: 4087 - protein, 9 aa, Homo sapiens
  Light chain CDR3 for antibody 2044 (IGKV2D-28)
MQALQTPGT

SEQ ID NO: 4088 - protein, 12 aa, Homo sapiens
  Heavy chain CDR3 for antibody 2044 (IGHV2-5)
AHRRNFLGHFDY

SEQ ID NO: 4089 - protein, 9 aa, Homo sapiens
  Light chain CDR3 for antibody 2045 (IGKV3-20)
QQYGSSPLT

SEQ ID NO: 4090 - protein, 11 aa, Homo sapiens
  Heavy chain CDR3 for antibody 2045 (IGHV1-69)
ASRDTYNWFDP

SEQ ID NO: 4091 - protein, 9 aa, Homo sapiens
  Light chain CDR3 for antibody 2046 (IGKV1-39)
QQSYSTPRT

SEQ ID NO: 4092 - protein, 12 aa, Homo sapiens
  Heavy chain CDR3 for antibody 2046 (IGHV2-70)
ARETVRGVHFDY

SEQ ID NO: 4093 - protein, 9 aa, Homo sapiens
  Light chain CDR3 for antibody 2047 (IGKV1-13)
QQFNSYPRT

SEQ ID NO: 4094 - protein, 12 aa, Homo sapiens
  Heavy chain CDR3 for antibody 2047 (IGHV3-53)
ARDLGYAGGLDY

SEQ ID NO: 4095 - protein, 9 aa, Homo sapiens
  Light chain CDR3 for antibody 2048 (IGKV3-20)
QQYGSSPLT

SEQ ID NO: 4096 - protein, 12 aa, Homo sapiens
  Heavy chain CDR3 for antibody 2048 (IGHV1-69)
ARAPIILHAFDI

SEQ ID NO: 4097 - protein, 10 aa, Homo sapiens
  Light chain CDR3 for antibody 2049 (IGKV1-39)
QQSYSTPPFT

SEQ ID NO: 4098 - protein, 12 aa, Homo sapiens
  Heavy chain CDR3 for antibody 2049 (IGHV3-53)
ARDLGYAGGLDY

SEQ ID NO: 4099 - protein, 9 aa, Homo sapiens
  Light chain CDR3 for antibody 2050 (IGKV3-20)
QQYGSSPLT

SEQ ID NO: 4100 - protein, 17 aa, Homo sapiens
  Heavy chain CDR3 for antibody 2050 (IGHV4-31)
ASSRGGDYGDYSGPFDY

SEQ ID NO: 4101 - protein, 9 aa, Homo sapiens
  Light chain CDR3 for antibody 2051 (IGKV1-39)
QQSYTIPVT

SEQ ID NO: 4102 - protein, 14 aa, Homo sapiens
  Heavy chain CDR3 for antibody 2051 (IGHV4-31)
ARVRAYGDYIYFDN

SEQ ID NO: 4103 - protein, 10 aa, Homo sapiens
  Light chain CDR3 for antibody 2052 (IGKV3-15)
QQYNNWPPLT

SEQ ID NO: 4104 - protein, 19 aa, Homo sapiens
  Heavy chain CDR3 for antibody 2052 (IGHV4-31)
ARVVGHTIFGVVIIQNFDY

SEQ ID NO: 4105 - protein, 10 aa, Homo sapiens [sequence omitted]

SEQ ID NO: 4106 - protein, 15 aa, Homo sapiens
  Heavy chain CDR3 for antibody 2053 (IGHV5-51)
ARLRGERVVTEFFDP

SEQ ID NO: 4107 - protein, 10 aa, Homo sapiens
  Light chain CDR3 for antibody 2054 (IGKV1-39)
QQSYSTPPFT

SEQ ID NO: 4108 - protein, 12 aa, Homo sapiens
  Heavy chain CDR3 for antibody 2054 (IGHV3-66)
ARDCLGIPSMDV

SEQ ID NO: 4109 - protein, 8 aa, Homo sapiens
  Light chain CDR3 for antibody 2055 (IGKV3-20)
QQYGSSPP

SEQ ID NO: 4110 - protein, 18 aa, Homo sapiens
  Heavy chain CDR3 for antibody 2055 (IGHV1-69)
ATPRGYGSGWYVLWAFDI

SEQ ID NO: 4111 - protein, 8 aa, Homo sapiens
  Light chain CDR3 for antibody 2056 (IGKV3-20)
QQYGSSPP

SEQ ID NO: 4112 - protein, 12 aa, Homo sapiens
  Heavy chain CDR3 for antibody 2056 (IGHV1-69)
ARAPIILHAFDI

SEQ ID NO: 4113 - protein, 10 aa, Homo sapiens [sequence omitted]

SEQ ID NO: 4114 - protein, 20 aa, Homo sapiens
  Heavy chain CDR3 for antibody 2057 (IGHV4-34)
ARGSLLRYFDWTYYYYGMDV

SEQ ID NO: 4115 - protein, 9 aa, Homo sapiens
  Light chain CDR3 for antibody 2058 (IGKV1-27)
QKYNSAPRT

SEQ ID NO: 4116 - protein, 12 aa, Homo sapiens
  Heavy chain CDR3 for antibody 2058 (IGHV2-5)
AHRRNFLGHFDY

SEQ ID NO: 4117 - protein, 9 aa, Homo sapiens
  Light chain CDR3 for antibody 2059 (IGKV3-20)
QQYGSSPLT

SEQ ID NO: 4118 - protein, 16 aa, Homo sapiens
  Heavy chain CDR3 for antibody 2059 (IGHV2-26)
AHGYCGAGSCPALFDS

SEQ ID NO: 4119 - protein, 10 aa, Homo sapiens
  Light chain CDR3 for antibody 2060 (IGKV3-11)
QQRSNWPPWT

SEQ ID NO: 4120 - protein, 13 aa, Homo sapiens
  Heavy chain CDR3 for antibody 2060 (IGHV3-11)
AGNDFWSGYYVVY

SEQ ID NO: 4121 - protein, 10 aa, Homo sapiens
  Light chain CDR3 for antibody 2061 (IGKV1-39)
QQSYSTPPFT

SEQ ID NO: 4122 - protein, 10 aa, Homo sapiens
  Heavy chain CDR3 for antibody 2061 (IGHV3-53)
ARDLASGEGP

SEQ ID NO: 4123 - protein, 8 aa, Homo sapiens
  Light chain CDR3 for antibody 2062 (IGKV1-5)
QQYNSYLT

SEQ ID NO: 4124 - protein, 11 aa, Homo sapiens
  Heavy chain CDR3 for antibody 2062 (IGHV1-69)
ASRDTYNWFDP

SEQ ID NO: 4125 - protein, 9 aa, Homo sapiens
  Light chain CDR3 for antibody 2063 (IGKV1-27)
QKYNSAPRT

SEQ ID NO: 4126 - protein, 20 aa, Homo sapiens
  Heavy chain CDR3 for antibody 2063 (IGHV4-34)
ARGSLLRYFDWTYYYYGMDV

SEQ ID NO: 4127 - protein, 9 aa, Homo sapiens
  Light chain CDR3 for antibody 2064 (IGKV3-20)
QQYGSSPLT

SEQ ID NO: 4128 - protein, 15 aa, Homo sapiens
  Heavy chain CDR3 for antibody 2064 (IGHV1-24)
ATGSAVAGHEGWFDP

SEQ ID NO: 4129 - protein, 9 aa, Homo sapiens
  Light chain CDR3 for antibody 2065 (IGKV1-39)
QQSYSTPYT

SEQ ID NO: 4130 - protein, 18 aa, Homo sapiens
  Heavy chain CDR3 for antibody 2065 (IGHV3-11)
ATPRGYGSGWYVLWAFDI

SEQ ID NO: 4131 - protein, 9 aa, Homo sapiens
  Light chain CDR3 for antibody 2066 (IGKV1-12)
QQANSFPFT

SEQ ID NO: 4132 - protein, 19 aa, Homo sapiens
  Heavy chain CDR3 for antibody 2066 (IGHV4-61)
ARERVGVQWPVYYYYGMDV

SEQ ID NO: 4133 - protein, 10 aa, Homo sapiens
  Light chain CDR3 for antibody 2067 (IGKV1-33)
QQYDNLPPYT

SEQ ID NO: 4134 - protein, 16 aa, Homo sapiens
  Heavy chain CDR3 for antibody 2067 (IGHV3-30)
AKHGCSYGCWLGCFDY

SEQ ID NO: 4135 - protein, 10 aa, Homo sapiens
  Light chain CDR3 for antibody 2068 (IGKV3-15)
QQYNNWPPIT

SEQ ID NO: 4136 - protein, 22 aa, Homo sapiens
  Heavy chain CDR3 for antibody 2068 (IGHV4-39)
ARQNSNRITIFGVVKGGNWFDP

SEQ ID NO: 4137 - protein, 9 aa, Homo sapiens
  Light chain CDR3 for antibody 2069 (IGKV1-39)
QQSYDTPRT

SEQ ID NO: 4138 - protein, 19 aa, Homo sapiens
  Heavy chain CDR3 for antibody 2069 (IGHV4-31)
ARVVGHTIFGVVIIQNFDY

SEQ ID NO: 4139 - protein, 10 aa, Homo sapiens
  Light chain CDR3 for antibody 2070 (IGKV1-39)
QQSYSTPPFT

SEQ ID NO: 4140 - protein, 11 aa, Homo sapiens
  Heavy chain CDR3 for antibody 2070 (IGHV3-53)
ARAYGDYYFDY

SEQ ID NO: 4141 - protein, 9 aa, Homo sapiens
  Light chain CDR3 for antibody 2071 (IGKV3-20)
QQYGSSPLT

SEQ ID NO: 4142 - protein, 18 aa, Homo sapiens
  Heavy chain CDR3 for antibody 2071 (IGHV1-69)
ARERYSSGWDYYYYGMDV

SEQ ID NO: 4143 - protein, 10 aa, Homo sapiens
  Light chain CDR3 for antibody 2072 (IGKV1-33)
QQYDNLPPYT

SEQ ID NO: 4144 - protein, 16 aa, Homo sapiens
  Heavy chain CDR3 for antibody 2072 (IGHV1-2)
ARGDVVDPGVALVLDV

SEQ ID NO: 4145 - protein, 10 aa, Homo sapiens
  Light chain CDR3 for antibody 2073 (IGKV1-9)
QQLNSYPPYT

SEQ ID NO: 4146 - protein, 16 aa, Homo sapiens
  Heavy chain CDR3 for antibody 2073 (IGHV3-30)
AKHGYSYGYWLGYFDY

SEQ ID NO: 4147 - protein, 10 aa, Homo sapiens
  Light chain CDR3 for antibody 2074 (IGKV1-33)
QQYDNLPPYT

SEQ ID NO: 4148 - protein, 18 aa, Homo sapiens
  Heavy chain CDR3 for antibody 2074 (IGHV4-34)
ARGTTVTTLYYYYYGMDV

SEQ ID NO: 4149 - protein, 10 aa, Homo sapiens
  Light chain CDR3 for antibody 2075 (IGKV3-20)
QQYGSSPLFT

SEQ ID NO: 4150 - protein, 14 aa, Homo sapiens
  Heavy chain CDR3 for antibody 2075 (IGHV4-61)
ARGCSGGSCYSFGY

SEQ ID NO: 4151 - protein, 9 aa, Homo sapiens
  Light chain CDR3 for antibody 2076 (IGKV3-20)
QQYGSSPLT

SEQ ID NO: 4152 - protein, 16 aa, Homo sapiens
  Heavy chain CDR3 for antibody 2076 (IGHV3-30)
AKHGYSYGYWLGYFDY

SEQ ID NO: 4153 - protein, 10 aa, Homo sapiens
  Light chain CDR3 for antibody 2077 (IGKV1-33)
QQYDNLLLLT

SEQ ID NO: 4154 - protein, 12 aa, Homo sapiens
  Heavy chain CDR3 for antibody 2077 (IGHV5-51)
ASTTTPEYPLDP

SEQ ID NO: 4155 - protein, 9 aa, Homo sapiens
  Light chain CDR3 for antibody 2078 (IGKV1-12)
QQANSFPLT

SEQ ID NO: 4156 - protein, 12 aa, Homo sapiens
  Heavy chain CDR3 for antibody 2078 (IGHV3-53)
ARDLGYAGGLDY

SEQ ID NO: 4157 - protein, 9 aa, Homo sapiens
  Light chain CDR3 for antibody 2079 (IGKV3-20)
QQYGSSPRT

SEQ ID NO: 4158 - protein, 10 aa, Homo sapiens
  Heavy chain CDR3 for antibody 2079 (IGHV1-46)
ARERLRYFDY

SEQ ID NO: 4159 - protein, 9 aa, Homo sapiens
  Light chain CDR3 for antibody 2080 (IGKV1-6)
LQDYNYPRT

SEQ ID NO: 4160 - protein, 14 aa, Homo sapiens
  Heavy chain CDR3 for antibody 2080 (IGHV3-66)
ARVEFYGGKGAFDI

SEQ ID NO: 4161 - protein, 9 aa, Homo sapiens
  Light chain CDR3 for antibody 2081 (IGKV3-20)
QQYGSSPWT

SEQ ID NO: 4162 - protein, 21 aa, Homo sapiens
  Heavy chain CDR3 for antibody 2081 (IGHV4-b)
ARGGRFLEWLLSKNYYYYMDV

SEQ ID NO: 4163 - protein, 9 aa, Homo sapiens
  Light chain CDR3 for antibody 2082 (IGKV3-20)
QQYGSSPLT

SEQ ID NO: 4164 - protein, 19 aa, Homo sapiens
  Heavy chain CDR3 for antibody 2082 (IGHV3-9)
ARGGYCTIGVCLLYNWFDP

SEQ ID NO: 4165 - protein, 9 aa, Homo sapiens
  Light chain CDR3 for antibody 2083 (IGKV1-39)
QQSYSTPPT

SEQ ID NO: 4166 - protein, 19 aa, Homo sapiens
  Heavy chain CDR3 for antibody 2083 (IGHV3-74)
ARALPSDFWSGYFSYYFDY

SEQ ID NO: 4167 - protein, 10 aa, Homo sapiens
  Light chain CDR3 for antibody 2084 (IGKV1-33)
QQHDNLPPYT

SEQ ID NO: 4168 - protein, 11 aa, Homo sapiens
  Heavy chain CDR3 for antibody 2084 (IGHV3-66)
ARDWGDYYFDY

SEQ ID NO: 4169 - protein, 10 aa, Homo sapiens
  Light chain CDR3 for antibody 2085 (IGKV3-20)
QQYGHSPRYS

SEQ ID NO: 4170 - protein, 21 aa, Homo sapiens
  Heavy chain CDR3 for antibody 2085 (IGHV1-2)
AREMYYSDTDGFSIGGNWFDP

SEQ ID NO: 4171 - protein, 9 aa, Homo sapiens
  Light chain CDR3 for antibody 2086 (IGKV1-6)
LQDYNYPRT

SEQ ID NO: 4172 - protein, 10 aa, Homo sapiens
  Heavy chain CDR3 for antibody 2086 (IGHV3-53)
ARDLASGVDH

SEQ ID NO: 4173 - protein, 10 aa, Homo sapiens
  Light chain CDR3 for antibody 2087 (IGKV1-33)
QQYDNLLLLT

SEQ ID NO: 4174 - protein, 12 aa, Homo sapiens
  Heavy chain CDR3 for antibody 2087 (IGHV3-66)
ARDCLGIPSMDV

SEQ ID NO: 4175 - protein, 9 aa, Homo sapiens
  Light chain CDR3 for antibody 2088 (IGKV3-20)
QQYGSSPWT

SEQ ID NO: 4176 - protein, 20 aa, Homo sapiens
  Heavy chain CDR3 for antibody 2088 (IGHV4-39)
ASLSVLRYFDSLFYYYGMDV

SEQ ID NO: 4177 - protein, 9 aa, Homo sapiens
  Light chain CDR3 for antibody 2089 (IGKV3-20)
QQYGSSPLT

SEQ ID NO: 4178 - protein, 11 aa, Homo sapiens
  Heavy chain CDR3 for antibody 2089 (IGHV3-53)
ARAYGDYYFDY

SEQ ID NO: 4179 - protein, 9 aa, Homo sapiens
  Light chain CDR3 for antibody 2090 (IGKV1-33)
QQYDNLPRT

SEQ ID NO: 4180 - protein, 16 aa, Homo sapiens
  Heavy chain CDR3 for antibody 2090 (IGHV1-2)
ARGDVVDPGVALVLDV

SEQ ID NO: 4181 - protein, 10 aa, Homo sapiens
  Light chain CDR3 for antibody 2091 (IGKV1-33)
QQYDNLPPYT

SEQ ID NO: 4182 - protein, 18 aa, Homo sapiens
  Heavy chain CDR3 for antibody 2091 (IGHV3-11)
ATPRGYGSGWYVLWAFDI

SEQ ID NO: 4183 - protein, 9 aa, Homo sapiens
  Light chain CDR3 for antibody 2092 (IGKV3-20)
QQYGSSPLT

SEQ ID NO: 4184 - protein, 18 aa, Homo sapiens
  Heavy chain CDR3 for antibody 2092 (IGHV3-11)
ATPRGYGSGWYVLWAFDI

SEQ ID NO: 4185 - protein, 9 aa, Homo sapiens
  Light chain CDR3 for antibody 2093 (IGKV1-39)
QQSYTIPVT

SEQ ID NO: 4186 - protein, 16 aa, Homo sapiens
  Heavy chain CDR3 for antibody 2093 (IGHV3-21)
ARSTIHIVRGALAFDF

SEQ ID NO: 4187 - protein, 10 aa, Homo sapiens
  Light chain CDR3 for antibody 2094 (IGKV1-33)
QQYDNLLLLT

SEQ ID NO: 4188 - protein, 17 aa, Homo sapiens
  Heavy chain CDR3 for antibody 2094 (IGHV3-11)
ASSRGGDYGDYSGPFDY

SEQ ID NO: 4189 - protein, 10 aa, Homo sapiens
  Light chain CDR3 for antibody 2095 (IGKV1-33)
QQYDNLPPYT

SEQ ID NO: 4190 - protein, 22 aa, Homo sapiens
  Heavy chain CDR3 for antibody 2095 (IGHV3-74)
ARVVDTAMVDGINYYYYYGMDV

SEQ ID NO: 4191 - protein, 8 aa, Homo sapiens
  Light chain CDR3 for antibody 2096 (IGKV1-5)
QQYKSGYT

SEQ ID NO: 4192 - protein, 13 aa, Homo sapiens
  Heavy chain CDR3 for antibody 2096 (IGHV3-49)
TRNDFWGGYYSDY

SEQ ID NO: 4193 - protein, 8 aa, Homo sapiens
  Light chain CDR3 for antibody 2097 (IGKV4-1)
QQYYSTRT

SEQ ID NO: 4194 - protein, 24 aa, Homo sapiens
  Heavy chain CDR3 for antibody 2097 (IGHV4-34)
ARAEGRVVPAALGVAYYYYYYMDV

SEQ ID NO: 4195 - protein, 10 aa, Homo sapiens
  Light chain CDR3 for antibody 2098 (IGKV1-33)
QQYDNLPPYT

SEQ ID NO: 4196 - protein, 19 aa, Homo sapiens
  Heavy chain CDR3 for antibody 2098 (IGHV4-31)
ARVVGHTIFGVVIIQNFDY

SEQ ID NO: 4197 - protein, 9 aa, Homo sapiens
  Light chain CDR3 for antibody 2099 (IGKV1-6)
LQDYNYPLT

SEQ ID NO: 4198 - protein, 11 aa, Homo sapiens
  Heavy chain CDR3 for antibody 2099 (IGHV3-66)
ARDWGDYYFDY

SEQ ID NO: 4199 - protein, 9 aa, Homo sapiens
  Light chain CDR3 for antibody 2100 (IGKV1-6)
LQDYNYPRT

SEQ ID NO: 4200 - protein, 15 aa, Homo sapiens
  Heavy chain CDR3 for antibody 2100 (IGHV3-21)
ARDLGWYLHPIVLDY

SEQ ID NO: 4201 - protein, 9 aa, Homo sapiens
  Light chain CDR3 for antibody 2101 (IGKV1-13)
QQFNSYPRT

SEQ ID NO: 4202 - protein, 14 aa, Homo sapiens
  Heavy chain CDR3 for antibody 2101 (IGHV3-66)
ARVEFYGGKGAFDI

SEQ ID NO: 4203 - protein, 10 aa, Homo sapiens
  Light chain CDR3 for antibody 2102 (IGKV3-20)
QQYGSSPPGT

SEQ ID NO: 4204 - protein, 20 aa, Homo sapiens
  Heavy chain CDR3 for antibody 2102 (IGHV1-18)
ARDLTGYYDFWSGYSYYFDY

SEQ ID NO: 4205 - protein, 11 aa, Homo sapiens
  Light chain CDR3 for antibody 2103 (IGKV1-9)
QQLNSYPPGDT

SEQ ID NO: 4206 - protein, 14 aa, Homo sapiens
  Heavy chain CDR3 for antibody 2103 (IGHV3-66)
ARVEFYGGKGAFDI

SEQ ID NO: 4207 - protein, 9 aa, Homo sapiens
  Light chain CDR3 for antibody 2104 (IGKV1-33)
QQYDNLPRT

SEQ ID NO: 4208 - protein, 18 aa, Homo sapiens
  Heavy chain CDR3 for antibody 2104 (IGHV3-11)
ATPRGYGSGWYVLWAFDI

SEQ ID NO: 4209 - protein, 9 aa, Homo sapiens
  Light chain CDR3 for antibody 2105 (IGKV1-39)
QQSYSTPYT

SEQ ID NO: 4210 - protein, 17 aa, Homo sapiens
  Heavy chain CDR3 for antibody 2105 (IGHV4-31)
ASSRGGDYGDYSGPFDY

SEQ ID NO: 4211 - protein, 9 aa, Homo sapiens
  Light chain CDR3 for antibody 2106 (IGKV1-9)
QQLNNYPVT

SEQ ID NO: 4212 - protein, 13 aa, Homo sapiens
  Heavy chain CDR3 for antibody 2106 (IGHV4-59)
TRAPISTLNWFDP

SEQ ID NO: 4213 - protein, 8 aa, Homo sapiens
  Light chain CDR3 for antibody 2107 (IGKV4-1)
QQYYSTRT

SEQ ID NO: 4214 - protein, 20 aa, Homo sapiens
  Heavy chain CDR3 for antibody 2107 (IGHV4-34)
ARGSLLRYFDWTYYYYGMDV

SEQ ID NO: 4215 - protein, 8 aa, Homo sapiens
  Light chain CDR3 for antibody 2108 (IGKV3-20)
QQYGSSPP

SEQ ID NO: 4216 - protein, 11 aa, Homo sapiens
  Heavy chain CDR3 for antibody 2108 (IGHV3-53)
ARAYGDYYFDY

SEQ ID NO: 4217 - protein, 6 aa, Homo sapiens
  Light chain CDR3 for antibody 2109 (IGKV3-20)
QQSTYT

SEQ ID NO: 4218 - protein, 13 aa, Homo sapiens
  Heavy chain CDR3 for antibody 2109 (IGHV4-61)
ARDGPGEYYYFDY

SEQ ID NO: 4219 - protein, 10 aa, Homo sapiens
  Light chain CDR3 for antibody 2110 (IGKV3-20)
QQYGSSSGWT

SEQ ID NO: 4220 - protein, 14 aa, Homo sapiens
  Heavy chain CDR3 for antibody 2110 (IGHV2-5)
AHRPRLGTPSVFDY

SEQ ID NO: 4221 - protein, 10 aa, Homo sapiens
  Light chain CDR3 for antibody 2111 (IGKV1-33)
QQYDNLPPYT

SEQ ID NO: 4222 - protein, 15 aa, Homo sapiens
  Heavy chain CDR3 for antibody 2111 (IGHV4-61)
ASSWGYGSGSYYSDY

SEQ ID NO: 4223 - protein, 6 aa, Homo sapiens
  Light chain CDR3 for antibody 2112 (IGKV3-20)
QQSTYT

SEQ ID NO: 4224 - protein, 14 aa, Homo sapiens
  Heavy chain CDR3 for antibody 2112 (IGHV3-66)
ARVEFYGGKGAFDI

SEQ ID NO: 4225 - protein, 10 aa, Homo sapiens
  Light chain CDR3 for antibody 2113 (IGKV3-11)
QQRSNWPPWT

SEQ ID NO: 4226 - protein, 11 aa, Homo sapiens
  Heavy chain CDR3 for antibody 2113 (IGHV3-53)
ARAYGDYYFDY

SEQ ID NO: 4227 - protein, 9 aa, Homo sapiens
  Light chain CDR3 for antibody 2114 (IGKV3-20)
QQYGSSPLT

SEQ ID NO: 4228 - protein, 20 aa, Homo sapiens
  Heavy chain CDR3 for antibody 2114 (IGHV4-61)
ARDSLGVVLPNYYYYYGMDV

SEQ ID NO: 4229 - protein, 9 aa, Homo sapiens
  Light chain CDR3 for antibody 2115 (IGKV1-6)
LQDYNYPRT

SEQ ID NO: 4230 - protein, 19 aa, Homo sapiens
  Heavy chain CDR3 for antibody 2115 (IGHV3-33)
ARDGQGIAAAGTISSAFDI

SEQ ID NO: 4231 - protein, 6 aa, Homo sapiens
  Light chain CDR3 for antibody 2116 (IGKV3-20)
QQSTYT

SEQ ID NO: 4232 - protein, 19 aa, Homo sapiens
  Heavy chain CDR3 for antibody 2116 (IGHV4-31)
ARVVGHTIFGVVIIQNFDY

SEQ ID NO: 4233 - protein, 9 aa, Homo sapiens
  Light chain CDR3 for antibody 2117 (IGKV2D-28)
MQARQTPFT

SEQ ID NO: 4234 - protein, 8 aa, Homo sapiens
  Heavy chain CDR3 for antibody 2117 (IGHV3-53)
ARDVGGSA

SEQ ID NO: 4235 - protein, 9 aa, Homo sapiens
  Light chain CDR3 for antibody 2118 (IGKV1-39)
QQSYSTPLT

SEQ ID NO: 4236 - protein, 12 aa, Homo sapiens
  Heavy chain CDR3 for antibody 2118 (IGHV3-66)
ARDCLGIPSMDV

SEQ ID NO: 4237 - protein, 10 aa, Homo sapiens
  Light chain CDR3 for antibody 2119 (IGKV1-33)
QQYDNLPPYT

SEQ ID NO: 4238 - protein, 22 aa, Homo sapiens
  Heavy chain CDR3 for antibody 2119 (IGHV1-69)
ARGGWGTSSSWGPSYYYYYMDV

SEQ ID NO: 4239 - protein, 9 aa, Homo sapiens
  Light chain CDR3 for antibody 2120 (IGKV3-20)
QQYGSSPRT

SEQ ID NO: 4240 - protein, 17 aa, Homo sapiens
  Heavy chain CDR3 for antibody 2120 (IGHV3-23)
AKDRTITIFGVVKALDP

SEQ ID NO: 4241 - protein, 11 aa, Homo sapiens
  Light chain CDR3 for antibody 2121 (IGKV1-9)
QQLNSYPPGDT

SEQ ID NO: 4242 - protein, 19 aa, Homo sapiens
  Heavy chain CDR3 for antibody 2121 (IGHV3-33)
ARDGQGIAAAGTISSAFDI

SEQ ID NO: 4243 - protein, 8 aa, Homo sapiens
  Light chain CDR3 for antibody 2122 (IGKV3-20)
QQYGSSPP

SEQ ID NO: 4244 - protein, 14 aa, Homo sapiens
  Heavy chain CDR3 for antibody 2122 (IGHV3-21)
AKDPGVIVVVNFQH

SEQ ID NO: 4245 - protein, 6 aa, Homo sapiens
  Light chain CDR3 for antibody 2123 (IGKV3-20)
QQSTYT

SEQ ID NO: 4246 - protein, 15 aa, Homo sapiens
  Heavy chain CDR3 for antibody 2123 (IGHV4-61)
ASSWGYGSGSYYSDY

SEQ ID NO: 4247 - protein, 10 aa, Homo sapiens
  Light chain CDR3 for antibody 2124 (IGKV1-33)
QQYDNLLLLT

SEQ ID NO: 4248 - protein, 12 aa, Homo sapiens
  Heavy chain CDR3 for antibody 2124 (IGHV3-53)
ARDLGYAGGLDY

SEQ ID NO: 4249 - protein, 10 aa, Homo sapiens
  Light chain CDR3 for antibody 2125 (IGKV1-33)
QQHDNLPPYT

SEQ ID NO: 4250 - protein, 16 aa, Homo sapiens
  Heavy chain CDR3 for antibody 2125 (IGHV3-30)
AKQGCSYGYWLGYFDY

SEQ ID NO: 4251 - protein, 9 aa, Homo sapiens
  Light chain CDR3 for antibody 2126 (IGKV1-16)
QQYNSYPRT

SEQ ID NO: 4252 - protein, 17 aa, Homo sapiens
  Heavy chain CDR3 for antibody 2126 (IGHV4-31)
ASSRGGDYGDYSGPFDY

SEQ ID NO: 4253 - protein, 9 aa, Homo sapiens
  Light chain CDR3 for antibody 2127 (IGKV1-27)
QKYNSATWT

SEQ ID NO: 4254 - protein, 20 aa, Homo sapiens
  Heavy chain CDR3 for antibody 2127 (IGHV3-11)
ARTDVAYDFWSGYIAVRHDY

SEQ ID NO: 4255 - protein, 10 aa, Homo sapiens
  Light chain CDR3 for antibody 2128 (IGKV2-30)
MQGTHWPPLT

SEQ ID NO: 4256 - protein, 6 aa, Homo sapiens
  Heavy chain CDR3 for antibody 2128 (IGHV3-48)
ARDWHY

SEQ ID NO: 4257 - protein, 9 aa, Homo sapiens
  Light chain CDR3 for antibody 2129 (IGKV1-39)
QQSYSTPLT

SEQ ID NO: 4258 - protein, 16 aa, Homo sapiens
  Heavy chain CDR3 for antibody 2129 (IGHV3-30)
AKHGYSYGYWLGYFDY

SEQ ID NO: 4259 - protein, 9 aa, Homo sapiens
  Light chain CDR3 for antibody 2130 (IGKV3-20)
QQYGSSPRT

SEQ ID NO: 4260 - protein, 12 aa, Homo sapiens
  Heavy chain CDR3 for antibody 2130 (IGHV3-66)
ARDCLGIPSMDV

SEQ ID NO: 4261 - protein, 6 aa, Homo sapiens
  Light chain CDR3 for antibody 2131 (IGKV3-20)
QQSTYT

SEQ ID NO: 4262 - protein, 19 aa, Homo sapiens
  Heavy chain CDR3 for antibody 2131 (IGHV3-33)
ARDGQGIAAAGTISSAFDI

SEQ ID NO: 4263 - protein, 9 aa, Homo sapiens
  Light chain CDR3 for antibody 2132 (IGKV3-20)
QQLGTSSWT

SEQ ID NO: 4264 - protein, 11 aa, Homo sapiens
  Heavy chain CDR3 for antibody 2132 (IGHV3-74)
ARGGFNHAFDL

SEQ ID NO: 4265 - protein, 9 aa, Homo sapiens
  Light chain CDR3 for antibody 2133 (IGKV1-39)
QQSYSTPWT

SEQ ID NO: 4266 - protein, 15 aa, Homo sapiens
  Heavy chain CDR3 for antibody 2133 (IGHV3-30)
ARDGRDGYNRGAFDI

SEQ ID NO: 4267 - protein, 6 aa, Homo sapiens
  Light chain CDR3 for antibody 2134 (IGKV3-20)
QQSTYT

SEQ ID NO: 4268 - protein, 16 aa, Homo sapiens
  Heavy chain CDR3 for antibody 2134 (IGHV1-2)
ARGDVVDPGVALVLDV

SEQ ID NO: 4269 - protein, 9 aa, Homo sapiens
  Light chain CDR3 for antibody 2135 (IGKV1-33)
QQYDNLPRT

SEQ ID NO: 4270 - protein, 17 aa, Homo sapiens
  Heavy chain CDR3 for antibody 2135 (IGHV4-31)
ASSRGGDYGDYSGPFDY

SEQ ID NO: 4271 - protein, 10 aa, Homo sapiens
  Light chain CDR3 for antibody 2136 (IGKV1-33)
QQYDNLPPYT

SEQ ID NO: 4272 - protein, 12 aa, Homo sapiens
  Heavy chain CDR3 for antibody 2136 (IGHV2-5)
AHRRNFLGHFDY

SEQ ID NO: 4273 - protein, 10 aa, Homo sapiens
  Light chain CDR3 for antibody 2137 (IGKV1-33)
QQYDNLPPYT

SEQ ID NO: 4274 - protein, 16 aa, Homo sapiens
  Heavy chain CDR3 for antibody 2137 (IGHV3-66)
AEQGYSYGYWLGDFDY

SEQ ID NO: 4275 - protein, 6 aa, Homo sapiens
  Light chain CDR3 for antibody 2138 (IGKV3-20)
QQSTYT

SEQ ID NO: 4276 - protein, 12 aa, Homo sapiens
  Heavy chain CDR3 for antibody 2138 (IGHV2-5)
AHRRNFLGHFDY

SEQ ID NO: 4277 - protein, 8 aa, Homo sapiens
  Light chain CDR3 for antibody 2139 (IGKV1-5)
QQYNSYSG

SEQ ID NO: 4278 - protein, 12 aa, Homo sapiens
  Heavy chain CDR3 for antibody 2139 (IGHV1-69)
ARAPIILHAFDI

SEQ ID NO: 4279 - protein, 10 aa, Homo sapiens
  Light chain CDR3 for antibody 2140 (IGKV1-33)
QQYDNLLLLT

SEQ ID NO: 4280 - protein, 16 aa, Homo sapiens
  Heavy chain CDR3 for antibody 2140 (IGHV3-30)
AKHGYSYGYWLGYFDY

SEQ ID NO: 4281 - protein, 9 aa, Homo sapiens
  Light chain CDR3 for antibody 2141 (IGKV1-13)
QQFNSYPRT

SEQ ID NO: 4282 - protein, 19 aa, Homo sapiens
  Heavy chain CDR3 for antibody 2141 (IGHV3-33)
ARDGQGIAAAGTISSAFDI

SEQ ID NO: 4283 - protein, 10 aa, Homo sapiens
  Light chain CDR3 for antibody 2142 (IGKV1-33)
QQYDNLLLLT

SEQ ID NO: 4284 - protein, 11 aa, Homo sapiens
  Heavy chain CDR3 for antibody 2142 (IGHV3-71)
ARDPGWGYFDY

SEQ ID NO: 4285 - protein, 10 aa, Homo sapiens
  Light chain CDR3 for antibody 2143 (IGKV1-33)
QQHDNLPPYT

SEQ ID NO: 4286 - protein, 16 aa, Homo sapiens
  Heavy chain CDR3 for antibody 2143 (IGHV3-30)
AKHGYSDGDWLGYVDY

SEQ ID NO: 4287 - protein, 9 aa, Homo sapiens
  Light chain CDR3 for antibody 2144 (IGKV1-39)
QQSYSTPWT

SEQ ID NO: 4288 - protein, 20 aa, Homo sapiens
  Heavy chain CDR3 for antibody 2144 (IGHV4-34)
ARTHPPDDFWSGYRNRYFDY

SEQ ID NO: 4289 - protein, 10 aa, Homo sapiens
  Light chain CDR3 for antibody 2145 (IGKV1-33)
QQYDNLPPYT

SEQ ID NO: 4290 - protein, 16 aa, Homo sapiens
  Heavy chain CDR3 for antibody 2145 (IGHV3-64)
AKHGYIYAYCLCYFDY

SEQ ID NO: 4291 - protein, 10 aa, Homo sapiens
  Light chain CDR3 for antibody 2146 (IGKV1-33)
QQYDNLLLLT

SEQ ID NO: 4292 - protein, 18 aa, Homo sapiens
  Heavy chain CDR3 for antibody 2146 (IGHV4-34)
ARGGTVTTFYYYYYGMDV

SEQ ID NO: 4293 - protein, 9 aa, Homo sapiens
  Light chain CDR3 for antibody 2147 (IGKV1-13)
QQFNSYPRT

SEQ ID NO: 4294 - protein, 16 aa, Homo sapiens
  Heavy chain CDR3 for antibody 2147 (IGHV1-2)
ARGDVVDPGVALVLDV

SEQ ID NO: 4295 - protein, 9 aa, Homo sapiens
  Light chain CDR3 for antibody 2148 (IGKV1-6)
LQDYNYPLT

SEQ ID NO: 4296 - protein, 10 aa, Homo sapiens
  Heavy chain CDR3 for antibody 2148 (IGHV3-53)
ARDLAYGVDA

SEQ ID NO: 4297 - protein, 10 aa, Homo sapiens
  Light chain CDR3 for antibody 2149 (IGKV1-9)
QQLNSYPPYT

SEQ ID NO: 4298 - protein, 12 aa, Homo sapiens
  Heavy chain CDR3 for antibody 2149 (IGHV3-66)
ARDCLGIPSMDV

SEQ ID NO: 4299 - protein, 9 aa, Homo sapiens
  Light chain CDR3 for antibody 2150 (IGKV1-12)
QQANSFPFT

SEQ ID NO: 4300 - protein, 19 aa, Homo sapiens
  Heavy chain CDR3 for antibody 2150 (IGHV4-b)
ARVVGHTIFGVVIIQNFDY

SEQ ID NO: 4301 - protein, 10 aa, Homo sapiens
  Light chain CDR3 for antibody 2151 (IGKV1-33)
QQYDNLPPYT

SEQ ID NO: 4302 - protein, 16 aa, Homo sapiens
  Heavy chain CDR3 for antibody 2151 (IGHV3-30)
AKQGCRYGYWLGYFDD

SEQ ID NO: 4303 - protein, 9 aa, Homo sapiens
  Light chain CDR3 for antibody 2152 (IGKV1-6)
LQDYNYPRT

SEQ ID NO: 4304 - protein, 12 aa, Homo sapiens
  Heavy chain CDR3 for antibody 2152 (IGHV5-51)
ASTTTPEYPLDP

SEQ ID NO: 4305 - protein, 6 aa, Homo sapiens
  Light chain CDR3 for antibody 2153 (IGKV3-20)
QQSTYT

SEQ ID NO: 4306 - protein, 22 aa, Homo sapiens
  Heavy chain CDR3 for antibody 2153 (IGHV1-69)
ARGGWGTSSSWGPSYYYYYMDV

SEQ ID NO: 4307 - protein, 9 aa, Homo sapiens
  Light chain CDR3 for antibody 2154 (IGKV1-33)
QQYDNLPRT

SEQ ID NO: 4308 - protein, 12 aa, Homo sapiens
  Heavy chain CDR3 for antibody 2154 (IGHV3-30)
GRDCLGVASMDV

SEQ ID NO: 4309 - protein, 9 aa, Homo sapiens
  Light chain CDR3 for antibody 2155 (IGKV1-5)
QQYNSYSLA

SEQ ID NO: 4310 - protein, 12 aa, Homo sapiens
  Heavy chain CDR3 for antibody 2155 (IGHV1-69)
ARREIVVGAFDI

SEQ ID NO: 4311 - protein, 10 aa, Homo sapiens
  Light chain CDR3 for antibody 2156 (IGKV1-33)
QQYDNLPPYT

SEQ ID NO: 4312 - protein, 20 aa, Homo sapiens
  Heavy chain CDR3 for antibody 2156 (IGHV5-a)
ARRGKQWLAGYYYYYYYMDV

SEQ ID NO: 4313 - protein, 9 aa, Homo sapiens
  Light chain CDR3 for antibody 2157 (IGKV1-6)
LQNKDAAWT

SEQ ID NO: 4314 - protein, 10 aa, Homo sapiens
  Heavy chain CDR3 for antibody 2157 (IGHV3-53)
ARDLASGEGP

SEQ ID NO: 4315 - protein, 8 aa, Homo sapiens
  Light chain CDR3 for antibody 2158 (IGKV4-1)
QQYYSTRT

SEQ ID NO: 4316 - protein, 12 aa, Homo sapiens
  Heavy chain CDR3 for antibody 2158 (IGHV3-66)
ARDCLGIPSMDV

SEQ ID NO: 4317 - protein, 10 aa, Homo sapiens
  Light chain CDR3 for antibody 2159 (IGKV1-33)
QQYDNLPPYT

SEQ ID NO: 4318 - protein, 16 aa, Homo sapiens
  Heavy chain CDR3 for antibody 2159 (IGHV3-d)
AKHGCRYGYWLCYFDY

SEQ ID NO: 4319 - protein, 10 aa, Homo sapiens
  Light chain CDR3 for antibody 2160 (IGKV1-33)
QQYDNLLLLT

SEQ ID NO: 4320 - protein, 15 aa, Homo sapiens
  Heavy chain CDR3 for antibody 2160 (IGHV3-21)
ARDLGWYLHPIVLDY

SEQ ID NO: 4321 - protein, 9 aa, Homo sapiens
  Light chain CDR3 for antibody 2161 (IGKV3-11)
QQRSNWPLT

SEQ ID NO: 4322 - protein, 24 aa, Homo sapiens
  Heavy chain CDR3 for antibody 2161 (IGHV3-30)
ARDIRDPGVLLWFGESDYYYGMDV

SEQ ID NO: 4323 - protein, 6 aa, Homo sapiens
  Light chain CDR3 for antibody 2162 (IGKV3-20)
QQSTYT

SEQ ID NO: 4324 - protein, 18 aa, Homo sapiens
  Heavy chain CDR3 for antibody 2162 (IGHV4-34)
ARGTTVTTLYYYYYGMDV

SEQ ID NO: 4325 - protein, 9 aa, Homo sapiens
  Light chain CDR3 for antibody 2163 (IGKV1-33)
QQYDNLPRT

SEQ ID NO: 4326 - protein, 22 aa, Homo sapiens
  Heavy chain CDR3 for antibody 2163 (IGHV3-74)
ARVVDTAMVDGINYYYYYGMDV

SEQ ID NO: 4327 - protein, 10 aa, Homo sapiens
  Light chain CDR3 for antibody 2164 (IGKV1-33)
QQYDNLPPYT

SEQ ID NO: 4328 - protein, 16 aa, Homo sapiens
  Heavy chain CDR3 for antibody 2164 (IGHV3-64)
AKHGCSCGYWLGYFDY

SEQ ID NO: 4329 - protein, 8 aa, Homo sapiens
  Light chain CDR3 for antibody 2165 (IGKV4-1)
QQYYSTRT

SEQ ID NO: 4330 - protein, 17 aa, Homo sapiens
  Heavy chain CDR3 for antibody 2165 (IGHV4-31)
ARDPRGWLQSEWGAFDI

SEQ ID NO: 4331 - protein, 9 aa, Homo sapiens
  Light chain CDR3 for antibody 2166 (IGKV3-11)
QQYYSYPYT

SEQ ID NO: 4332 - protein, 14 aa, Homo sapiens
  Heavy chain CDR3 for antibody 2166 (IGHV3-23)
AKDPGVIVVVNFQH

SEQ ID NO: 4333 - protein, 8 aa, Homo sapiens
  Light chain CDR3 for antibody 2167 (IGKV4-1)
QQYYSTRT

SEQ ID NO: 4334 - protein, 10 aa, Homo sapiens
  Heavy chain CDR3 for antibody 2167 (IGHV3-53)
ARDLASGEGP

SEQ ID NO: 4335 - protein, 9 aa, Homo sapiens
  Light chain CDR3 for antibody 2168 (IGKV1-39)
QQSYSTPLT

SEQ ID NO: 4336 - protein, 11 aa, Homo sapiens
  Heavy chain CDR3 for antibody 2168 (IGHV3-66)
ARDWGDYYFDY

SEQ ID NO: 4337 - protein, 10 aa, Homo sapiens
  Light chain CDR3 for antibody 2169 (IGKV3-15)
QQYNNWPPLT

SEQ ID NO: 4338 - protein, 20 aa, Homo sapiens
  Heavy chain CDR3 for antibody 2169 (IGHV4-61)
ARDSLGVVLPNYYYYYGMDV

SEQ ID NO: 4339 - protein, 10 aa, Homo sapiens
  Light chain CDR3 for antibody 2170 (IGKV1-33)
QQHDNLPPYT

SEQ ID NO: 4340 - protein, 17 aa, Homo sapiens
  Heavy chain CDR3 for antibody 2170 (IGHV4-31)
ASSRGGDYGDYSGPFDY

SEQ ID NO: 4341 - protein, 10 aa, Homo sapiens
  Light chain CDR3 for antibody 2171 (IGKV1-33)
QQYDNLPPYT

SEQ ID NO: 4342 - protein, 16 aa, Homo sapiens
  Heavy chain CDR3 for antibody 2171 (IGHV3-30)
AKHGYSYGDWLGDFDY

SEQ ID NO: 4343 - protein, 11 aa, Homo sapiens
  Light chain CDR3 for antibody 2172 (IGKV3-20)
QQYGSSPPALT

SEQ ID NO: 4344 - protein, 22 aa, Homo sapiens
  Heavy chain CDR3 for antibody 2172 (IGHV4-39)
ARHRTNSITIFGVVTMNNWFDP

SEQ ID NO: 4345 - protein, 10 aa, Homo sapiens
  Light chain CDR3 for antibody 2173 (IGKV1-33)
QQHDNLPPYT

SEQ ID NO: 4346 - protein, 16 aa, Homo sapiens
  Heavy chain CDR3 for antibody 2173 (IGHV3-30)
AKHGYSYGYWLDYFDY

SEQ ID NO: 4347 - protein, 9 aa, Homo sapiens
  Light chain CDR3 for antibody 2174 (IGKV1-33)
QQYDNLPRT

SEQ ID NO: 4348 - protein, 18 aa, Homo sapiens
  Heavy chain CDR3 for antibody 2174 (IGHV1-69)
AREIVLMVYAPPIGAFDI

SEQ ID NO: 4349 - protein, 9 aa, Homo sapiens
  Light chain CDR3 for antibody 2175 (IGKV1-13)
QQFNSYPRT

SEQ ID NO: 4350 - protein, 12 aa, Homo sapiens
  Heavy chain CDR3 for antibody 2175 (IGHV2-5)
AHRRNFLGHFDY

SEQ ID NO: 4351 - protein, 9 aa, Homo sapiens
  Light chain CDR3 for antibody 2176 (IGKV1-33)
QQYDNLPRT

SEQ ID NO: 4352 - protein, 18 aa, Homo sapiens
  Heavy chain CDR3 for antibody 2176 (IGHV4-34)
ARGTTVTTLYYYYYGMDV

SEQ ID NO: 4353 - protein, 8 aa, Homo sapiens
  Light chain CDR3 for antibody 2177 (IGKV4-1)
QQYYSTRT

SEQ ID NO: 4354 - protein, 11 aa, Homo sapiens
  Heavy chain CDR3 for antibody 2177 (IGHV3-66)
ARAYGDYYFDY

SEQ ID NO: 4355 - protein, 8 aa, Homo sapiens
  Light chain CDR3 for antibody 2178 (IGKV4-1)
QQYYSTRT

SEQ ID NO: 4356 - protein, 19 aa, Homo sapiens
  Heavy chain CDR3 for antibody 2178 (IGHV4-31)
ARVVGHTIFGVVIIQNFDY

SEQ ID NO: 4357 - protein, 9 aa, Homo sapiens
  Light chain CDR3 for antibody 2179 (IGKV1-6)
LQDYNYPRT

SEQ ID NO: 4358 - protein, 22 aa, Homo sapiens
  Heavy chain CDR3 for antibody 2179 (IGHV3-74)
ARVVDTAMVDGINYYYYYGMDV

SEQ ID NO: 4359 - protein, 10 aa, Homo sapiens
  Light chain CDR3 for antibody 2180 (IGKV1-33)
QQYDNLLLLT

SEQ ID NO: 4360 - protein, 19 aa, Homo sapiens
  Heavy chain CDR3 for antibody 2180 (IGHV4-61)
AREGYYDSSGYFSRGGFDY

SEQ ID NO: 4361 - protein, 9 aa, Homo sapiens
  Light chain CDR3 for antibody 2181 (IGKV1-33)
QQYDNLPRT

SEQ ID NO: 4362 - protein, 19 aa, Homo sapiens
  Heavy chain CDR3 for antibody 2181 (IGHV4-31)
ARVVGHTIFGVVIIQNFDY

SEQ ID NO: 4363 - protein, 9 aa, Homo sapiens
  Light chain CDR3 for antibody 2182 (IGKV1-33)
QQYDNLPRT

SEQ ID NO: 4364 - protein, 20 aa, Homo sapiens
  Heavy chain CDR3 for antibody 2182 (IGHV5-a)
ARRGKQWLAGYYYYYYYIDV

SEQ ID NO: 4365 - protein, 10 aa, Homo sapiens
  Light chain CDR3 for antibody 2183 (IGKV1-33)
QQYDNLPPYT

SEQ ID NO: 4366 - protein, 16 aa, Homo sapiens
  Heavy chain CDR3 for antibody 2183 (IGHV3-64)
AKHGYSYCYWFGYFDY

SEQ ID NO: 4367 - protein, 9 aa, Homo sapiens
  Light chain CDR3 for antibody 2184 (IGKV1-6)
LQDYNYPRT

SEQ ID NO: 4368 - protein, 20 aa, Homo sapiens
  Heavy chain CDR3 for antibody 2184 (IGHV5-a)
ARRGKQWLAGYYYYYYYMDV

SEQ ID NO: 4369 - protein, 9 aa, Homo sapiens
  Light chain CDR3 for antibody 2185 (IGKV1-33)
QQYDNLPFT

SEQ ID NO: 4370 - protein, 11 aa, Homo sapiens
  Heavy chain CDR3 for antibody 2185 (IGHV3-66)
ARDWGDYYFDY

SEQ ID NO: 4371 - protein, 8 aa, Homo sapiens
  Light chain CDR3 for antibody 2186 (IGKV3-20)
QQYGSSRT

SEQ ID NO: 4372 - protein, 12 aa, Homo sapiens
  Heavy chain CDR3 for antibody 2186 (IGHV1-69)
ATYSTSWHVTDY

SEQ ID NO: 4373 - protein, 9 aa, Homo sapiens
  Light chain CDR3 for antibody 2187 (IGKV3-20)
QQYDSSPRT

SEQ ID NO: 4374 - protein, 11 aa, Homo sapiens
  Heavy chain CDR3 for antibody 2187 (IGHV3-66)
ARDYGDFYSDY

SEQ ID NO: 4375 - protein, 9 aa, Homo sapiens
  Light chain CDR3 for antibody 2188 (IGKV1-33)
QQYGDLPYS

SEQ ID NO: 4376 - protein, 11 aa, Homo sapiens
  Heavy chain CDR3 for antibody 2188 (IGHV3-53)
ARDRPGGLHDY

SEQ ID NO: 4377 - protein, 9 aa, Homo sapiens
  Light chain CDR3 for antibody 2189 (IGKV4-1)
QQYYSTPPT

SEQ ID NO: 4378 - protein, 14 aa, Homo sapiens
  Heavy chain CDR3 for antibody 2189 (IGHV3-h)
ARARTTLQLELFDY

SEQ ID NO: 4379 - protein, 9 aa, Homo sapiens
  Light chain CDR3 for antibody 2190 (IGKV3-20)
QQYGSSPWT

SEQ ID NO: 4380 - protein, 12 aa, Homo sapiens
  Heavy chain CDR3 for antibody 2190 (IGHV1-69)
ATYSTSWHVTDY

SEQ ID NO: 4381 - protein, 9 aa, Homo sapiens
  Light chain CDR3 for antibody 2191 (IGKV1-39)
QQSYSTPLT

SEQ ID NO: 4382 - protein, 11 aa, Homo sapiens
  Heavy chain CDR3 for antibody 2191 (IGHV3-66)
ARDYGDFYSDY

SEQ ID NO: 4383 - protein, 8 aa, Homo sapiens
  Light chain CDR3 for antibody 2192 (IGKV3-20)
QQYGSSRT

SEQ ID NO: 4384 - protein, 16 aa, Homo sapiens
  Heavy chain CDR3 for antibody 2192 (IGHV1-58)
AAPYCSSTSCHDAFDI

SEQ ID NO: 4385 - protein, 9 aa, Homo sapiens
  Light chain CDR3 for antibody 2193 (IGKV3-20)
QQYGSSPRT

SEQ ID NO: 4386 - protein, 11 aa, Homo sapiens
  Heavy chain CDR3 for antibody 2193 (IGHV3-53)
ARDYGDYYFDY

SEQ ID NO: 4387 - protein, 9 aa, Homo sapiens
  Light chain CDR3 for antibody 2194 (IGKV1-12)
QQGNSLPPS

SEQ ID NO: 4388 - protein, 11 aa, Homo sapiens
  Heavy chain CDR3 for antibody 2194 (IGHV3-66)
ARDYGDFYSDY

SEQ ID NO: 4389 - protein, 9 aa, Homo sapiens
  Light chain CDR3 for antibody 2195 (IGKV1-33)
QQYDNLPLT

SEQ ID NO: 4390 - protein, 19 aa, Homo sapiens
  Heavy chain CDR3 for antibody 2195 (IGHV1-8)
ATPRGDSSGWYGYYYGMDV

SEQ ID NO: 4391 - protein, 9 aa, Homo sapiens
  Light chain CDR3 for antibody 2196 (IGKV1-33)
QQYDQRPPT

SEQ ID NO: 4392 - protein, 11 aa, Homo sapiens
  Heavy chain CDR3 for antibody 2196 (IGHV1-2)
AGALVNPTLDR

SEQ ID NO: 4393 - protein, 9 aa, Homo sapiens
  Light chain CDR3 for antibody 2197 (IGKV1-39)
QQSYSTPLT

SEQ ID NO: 4394 - protein, 8 aa, Homo sapiens
  Heavy chain CDR3 for antibody 2197 (IGHV1-69)
ATGPSDSG

SEQ ID NO: 4395 - protein, 9 aa, Homo sapiens
  Light chain CDR3 for antibody 2198 (IGKV3-20)
QQYGSSPQN

SEQ ID NO: 4396 - protein, 11 aa, Homo sapiens
  Heavy chain CDR3 for antibody 2198 (IGHV4-59)
GSNEFWGTSSY

SEQ ID NO: 4397 - protein, 9 aa, Homo sapiens
  Light chain CDR3 for antibody 2199 (IGKV1-5)
QQYNTYSWT

SEQ ID NO: 4398 - protein, 9 aa, Homo sapiens
  Heavy chain CDR3 for antibody 2199 (IGHV3-53)
ASGQGDSLL

SEQ ID NO: 4399 - protein, 9 aa, Homo sapiens
  Light chain CDR3 for antibody 2200 (IGKV1-5)
QQYLSYPWT

SEQ ID NO: 4400 - protein, 14 aa, Homo sapiens
  Heavy chain CDR3 for antibody 2200 (IGHV3-48)
ARDRRDGGYPNCDR

SEQ ID NO: 4401 - protein, 10 aa, Homo sapiens
  Light chain CDR3 for antibody 2201 (IGKV1-39)
QQSYSTPPWT

SEQ ID NO: 4402 - protein, 18 aa, Homo sapiens
  Heavy chain CDR3 for antibody 2201 (IGHV3-13)
ARGNGYYDSSGYYYYFDY

SEQ ID NO: 4403 - protein, 9 aa, Homo sapiens
  Light chain CDR3 for antibody 2202 (IGKV1-9)
QQLDAYPFT

SEQ ID NO: 4404 - protein, 18 aa, Homo sapiens
  Heavy chain CDR3 for antibody 2202 (IGHV1-3)
ARSNIMVGIRGKRSPFEY

SEQ ID NO: 4405 - protein, 9 aa, Homo sapiens
  Light chain CDR3 for antibody 2203 (IGKV1-12)
HQAHSIPLT

SEQ ID NO: 4406 - protein, 12 aa, Homo sapiens
  Heavy chain CDR3 for antibody 2203 (IGHV4-61)
ARDRRGSGWYVD

SEQ ID NO: 4407 - protein, 9 aa, Homo sapiens
  Light chain CDR3 for antibody 2204 (IGKV1-33)
QQYDNLPLT

SEQ ID NO: 4408 - protein, 14 aa, Homo sapiens
  Heavy chain CDR3 for antibody 2204 (IGHV5-a)
ARRTTEYSGSYFYF

SEQ ID NO: 4409 - protein, 9 aa, Homo sapiens
  Light chain CDR3 for antibody 2205 (IGKV1-27)
QKYNSAPRT

SEQ ID NO: 4410 - protein, 9 aa, Homo sapiens
  Heavy chain CDR3 for antibody 2205 (IGHV1-69)
ARDGMGADY

SEQ ID NO: 4411 - protein, 9 aa, Homo sapiens
  Light chain CDR3 for antibody 2206 (IGKV1-5)
QQYNSYSDT

SEQ ID NO: 4412 - protein, 12 aa, Homo sapiens
  Heavy chain CDR3 for antibody 2206 (IGHV4-59)
ARWSPFTAAFDH

SEQ ID NO: 4413 - protein, 9 aa, Homo sapiens
  Light chain CDR3 for antibody 2207 (IGKV3-20)
QQYGSSPWT

SEQ ID NO: 4414 - protein, 11 aa, Homo sapiens
  Heavy chain CDR3 for antibody 2207 (IGHV3-53)
ARDRPGGLHDY

SEQ ID NO: 4415 - protein, 9 aa, Homo sapiens
  Light chain CDR3 for antibody 2208 (IGKV1-12)
QQADSFPIT

SEQ ID NO: 4416 - protein, 16 aa, Homo sapiens
  Heavy chain CDR3 for antibody 2208 (IGHV6-1)
AREGVHGYSGHRPIDN

SEQ ID NO: 4417 - protein, 8 aa, Homo sapiens
  Light chain CDR3 for antibody 2209 (IGKV1-39)
QQSYRTWT

SEQ ID NO: 4418 - protein, 14 aa, Homo sapiens
  Heavy chain CDR3 for antibody 2209 (IGHV4-b)
ASGVAAAGTRWFDP

SEQ ID NO: 4419 - protein, 8 aa, Homo sapiens
  Light chain CDR3 for antibody 2210 (IGKV3-20)
QQYGSSRT

SEQ ID NO: 4420 - protein, 11 aa, Homo sapiens
  Heavy chain CDR3 for antibody 2210 (IGHV3-66)
ARDYGDFYSDY

SEQ ID NO: 4421 - protein, 9 aa, Homo sapiens
  Light chain CDR3 for antibody 2211 (IGKV1-33)
QQYGDLPYS

SEQ ID NO: 4422 - protein, 16 aa, Homo sapiens
  Heavy chain CDR3 for antibody 2211 (IGHV1-58)
AAPYCSSTSCHDAFDI

SEQ ID NO: 4423 - protein, 9 aa, Homo sapiens
  Light chain CDR3 for antibody 2212 (IGKV1-39)
QQSYSTAWT

SEQ ID NO: 4424 - protein, 23 aa, Homo sapiens
  Heavy chain CDR3 for antibody 2212 (IGHV2-26)
ARILRRYFDWLLYSDRGYYYMDV

SEQ ID NO: 4425 - protein, 9 aa, Homo sapiens
  Light chain CDR3 for antibody 2213 (IGKV3-20)
QQYGSSPYT

SEQ ID NO: 4426 - protein, 12 aa, Homo sapiens
  Heavy chain CDR3 for antibody 2213 (IGHV4-b)
ARTHSRGSSIDY

SEQ ID NO: 4427 - protein, 9 aa, Homo sapiens
  Light chain CDR3 for antibody 2214 (IGKV1-33)
QQYGDLPYS

SEQ ID NO: 4428 - protein, 11 aa, Homo sapiens
  Heavy chain CDR3 for antibody 2214 (IGHV3-66)
ARDYGDFYSDY

SEQ ID NO: 4429 - protein, 10 aa, Homo sapiens
  Light chain CDR3 for antibody 2215 (IGKV1-39)
QQSFTTVPFT

SEQ ID NO: 4430 - protein, 23 aa, Homo sapiens
  Heavy chain CDR3 for antibody 2215 (IGHV4-4)
VKVGPIVVVPDDEIFGDADAFEV

SEQ ID NO: 4431 - protein, 9 aa, Homo sapiens
  Light chain CDR3 for antibody 2216 (IGKV1-39)
QQSHRTPWT

SEQ ID NO: 4432 - protein, 11 aa, Homo sapiens
  Heavy chain CDR3 for antibody 2216 (IGHV1-8)
ARVIKGGHSDC

SEQ ID NO: 4433 - protein, 9 aa, Homo sapiens
  Light chain CDR3 for antibody 2217 (IGKV1-9)
QQLNSYPRT

SEQ ID NO: 4434 - protein, 12 aa, Homo sapiens
  Heavy chain CDR3 for antibody 2217 (IGHV4-59)
ARWSPFTAAFDH

SEQ ID NO: 4435 - protein, 9 aa, Homo sapiens
  Light chain CDR3 for antibody 2218 (IGKV1-33)
QQYDNLPFT

SEQ ID NO: 4436 - protein, 21 aa, Homo sapiens
  Heavy chain CDR3 for antibody 2218 (IGHV4-61)
ARERLVDSQQLAPDYYYGMDV

SEQ ID NO: 4437 - protein, 9 aa, Homo sapiens
  Light chain CDR3 for antibody 2219 (IGKV1-33)
QQYGDLPYS

SEQ ID NO: 4438 - protein, 12 aa, Homo sapiens
  Heavy chain CDR3 for antibody 2219 (IGHV1-69)
ATYSTSWHVTDY

SEQ ID NO: 4439 - protein, 9 aa, Homo sapiens
  Light chain CDR3 for antibody 2220 (IGKV3-20)
QQYGSSPWT

SEQ ID NO: 4440 - protein, 18 aa, Homo sapiens
  Heavy chain CDR3 for antibody 2220 (IGHV4-b)
ARGVTTAVFYYFYYYMDV

SEQ ID NO: 4441 - protein, 9 aa, Homo sapiens
  Light chain CDR3 for antibody 2221 (IGKV1-33)
QQYDNLPLT

SEQ ID NO: 4442 - protein, 9 aa, Homo sapiens
  Heavy chain CDR3 for antibody 2221 (IGHV1-69)
ARDGMGADY

SEQ ID NO: 4443 - protein, 9 aa, Homo sapiens
  Light chain CDR3 for antibody 2222 (IGKV4-1)
QQYYSTPPT

SEQ ID NO: 4444 - protein, 16 aa, Homo sapiens
  Heavy chain CDR3 for antibody 2222 (IGHV1-58)
AAPYCSSTSCHDAFDI

SEQ ID NO: 4445 - protein, 9 aa, Homo sapiens
  Light chain CDR3 for antibody 2223 (IGKV3-20)
QQYGSSPFT

SEQ ID NO: 4446 - protein, 11 aa, Homo sapiens
  Heavy chain CDR3 for antibody 2223 (IGHV3-48)
AREGGEDAFDI

SEQ ID NO: 4447 - protein, 7 aa, Homo sapiens
  Light chain CDR3 for antibody 2224 (IGKV1-39)
QESHDWT

SEQ ID NO: 4448 - protein, 17 aa, Homo sapiens
  Heavy chain CDR3 for antibody 2224 (IGHV4-59)
ARVGVLPGNHYYYYMDV

SEQ ID NO: 4449 - protein, 10 aa, Homo sapiens
  Light chain CDR3 for antibody 2225 (IGKV3-11)
QQRGNWPPYS

SEQ ID NO: 4450 - protein, 12 aa, Homo sapiens
  Heavy chain CDR3 for antibody 2225 (IGHV3-11)
AKSTIFGTEFDL

SEQ ID NO: 4451 - protein, 9 aa, Homo sapiens
  Light chain CDR3 for antibody 2226 (IGKV3-20)
QQYGSSPRT

SEQ ID NO: 4452 - protein, 13 aa, Homo sapiens
  Heavy chain CDR3 for antibody 2226 (IGHV3-20)
ARDVGYYNYYMDV

SEQ ID NO: 4453 - protein, 9 aa, Homo sapiens
  Light chain CDR3 for antibody 2227 (IGKV1-33)
QQHDDLPYT

SEQ ID NO: 4454 - protein, 13 aa, Homo sapiens
  Heavy chain CDR3 for antibody 2227 (IGHV4-31)
ARECTSTICTLDT

SEQ ID NO: 4455 - protein, 10 aa, Homo sapiens
  Light chain CDR3 for antibody 2228 (IGKV3-20)
QQYGSSPLWT

SEQ ID NO: 4456 - protein, 16 aa, Homo sapiens
  Heavy chain CDR3 for antibody 2228 (IGHV1-58)
AAPYCSSTSCHDAFDI

SEQ ID NO: 4457 - protein, 9 aa, Homo sapiens
  Light chain CDR3 for antibody 2229 (IGKV2D-28)
MQALQTPLT

SEQ ID NO: 4458 - protein, 14 aa, Homo sapiens
  Heavy chain CDR3 for antibody 2229 (IGHV2-5)
AHRRAVLGAGYFDY

SEQ ID NO: 4459 - protein, 10 aa, Homo sapiens
  Light chain CDR3 for antibody 2230 (IGKV3-11)
QQRSNWPSLT

SEQ ID NO: 4460 - protein, 15 aa, Homo sapiens
  Heavy chain CDR3 for antibody 2230 (IGHV1-69)
ARRVAVFGVGGSGDV

SEQ ID NO: 4461 - protein, 9 aa, Homo sapiens
  Light chain CDR3 for antibody 2231 (IGKV1-12)
HQAHSIPLT

SEQ ID NO: 4462 - protein, 11 aa, Homo sapiens
  Heavy chain CDR3 for antibody 2231 (IGHV4-39)
ARRAYGIGLDH

SEQ ID NO: 4463 - protein, 9 aa, Homo sapiens
  Light chain CDR3 for antibody 2232 (IGKV3D-20)
QQYAYSPTT

SEQ ID NO: 4464 - protein, 12 aa, Homo sapiens
  Heavy chain CDR3 for antibody 2232 (IGHV4-39)
ARATISYGSGDY

SEQ ID NO: 4465 - protein, 9 aa, Homo sapiens
  Light chain CDR3 for antibody 2233 (IGKV1-33)
QQYENLPRT

SEQ ID NO: 4466 - protein, 13 aa, Homo sapiens
  Heavy chain CDR3 for antibody 2233 (IGHV1-2)
ARAITADSRDFDY

SEQ ID NO: 4467 - protein, 9 aa, Homo sapiens
  Light chain CDR3 for antibody 2234 (IGKV1-39)
QQSYSTPYT

SEQ ID NO: 4468 - protein, 12 aa, Homo sapiens
  Heavy chain CDR3 for antibody 2234 (IGHV1-18)
ARDGGPLETFDY

SEQ ID NO: 4469 - protein, 9 aa, Homo sapiens
  Light chain CDR3 for antibody 2235 (IGKV1-27)
QKYNSAPQT

SEQ ID NO: 4470 - protein, 16 aa, Homo sapiens
  Heavy chain CDR3 for antibody 2235 (IGHV4-34)
VRDRPFQLSKYKTVGI

SEQ ID NO: 4471 - protein, 9 aa, Homo sapiens
  Light chain CDR3 for antibody 2236 (IGKV1-39)
QQTYNTRTT

SEQ ID NO: 4472 - protein, 22 aa, Homo sapiens
  Heavy chain CDR3 for antibody 2236 (IGHV4-31)
ARDPPRRITIFGVVMIEGYFDL

SEQ ID NO: 4473 - protein, 9 aa, Homo sapiens
  Light chain CDR3 for antibody 2237 (IGKV1-6)
LQDHDYRQT

SEQ ID NO: 4474 - protein, 16 aa, Homo sapiens
  Heavy chain CDR3 for antibody 2237 (IGHV5-51)
ARRWCSSASCQGVFDY

SEQ ID NO: 4475 - protein, 9 aa, Homo sapiens
  Light chain CDR3 for antibody 2238 (IGKV1-27)
QKYNSAPFT

SEQ ID NO: 4476 - protein, 13 aa, Homo sapiens
  Heavy chain CDR3 for antibody 2238 (IGHV1-69)
ASQTDVVRPGFNI

SEQ ID NO: 4477 - protein, 9 aa, Homo sapiens
  Light chain CDR3 for antibody 2239 (IGKV1D-12)
QQTNSFPLT

SEQ ID NO: 4478 - protein, 10 aa, Homo sapiens
  Heavy chain CDR3 for antibody 2239 (IGHV4-31)
ARVDDYYMDV

SEQ ID NO: 4479 - protein, 9 aa, Homo sapiens
  Light chain CDR3 for antibody 2240 (IGKV1-39)
QQSYSTPLT

SEQ ID NO: 4480 - protein, 11 aa, Homo sapiens
  Heavy chain CDR3 for antibody 2240 (IGHV3-53)
ARDRPGGLHDY

SEQ ID NO: 4481 - protein, 9 aa, Homo sapiens
  Light chain CDR3 for antibody 2241 (IGKV4-1)
QQYYSTPPT

SEQ ID NO: 4482 - protein, 12 aa, Homo sapiens
  Heavy chain CDR3 for antibody 2241 (IGHV1-69)
ATYSTSWHVTDY

SEQ ID NO: 4483 - protein, 10 aa, Homo sapiens
  Light chain CDR3 for antibody 2242 (IGKV1-33)
QQYDNLQGVT

SEQ ID NO: 4484 - protein, 10 aa, Homo sapiens
  Heavy chain CDR3 for antibody 2242 (IGHV1-8)
ARGYRNSYGY

SEQ ID NO: 4485 - protein, 9 aa, Homo sapiens
  Light chain CDR3 for antibody 2243 (IGKV1-33)
QQYDQRPPT

SEQ ID NO: 4486 - protein, 16 aa, Homo sapiens
  Heavy chain CDR3 for antibody 2243 (IGHV1-58)
AAPYCSSTSCHDAFDI

SEQ ID NO: 4487 - protein, 9 aa, Homo sapiens
  Light chain CDR3 for antibody 2244 (IGKV1-5)
QQYNSYPLT

SEQ ID NO: 4488 - protein, 12 aa, Homo sapiens
  Heavy chain CDR3 for antibody 2244 (IGHV4-61)
ARDRRGSGWYVD

SEQ ID NO: 4489 - protein, 9 aa, Homo sapiens
  Light chain CDR3 for antibody 2245 (IGKV3-15)
QQYYDWPET

SEQ ID NO: 4490 - protein, 14 aa, Homo sapiens
  Heavy chain CDR3 for antibody 2245 (IGHV3-11)
AREHSHYDVGAFDI

SEQ ID NO: 4491 - protein, 9 aa, Homo sapiens
  Light chain CDR3 for antibody 2246 (IGKV1-39)
QQSDSAPWT

SEQ ID NO: 4492 - protein, 11 aa, Homo sapiens
  Heavy chain CDR3 for antibody 2246 (IGHV3-11)
ARPGTSWAFDS

SEQ ID NO: 4493 - protein, 10 aa, Homo sapiens
  Light chain CDR3 for antibody 2247 (IGKV1-39)
QQSYSTPSLT

SEQ ID NO: 4494 - protein, 14 aa, Homo sapiens
  Heavy chain CDR3 for antibody 2247 (IGHV1-18)
ARDQGVLLSDYFDY

SEQ ID NO: 4495 - protein, 9 aa, Homo sapiens
  Light chain CDR3 for antibody 2248 (IGKV1-5)
QQYNGYSRA

SEQ ID NO: 4496 - protein, 10 aa, Homo sapiens
  Heavy chain CDR3 for antibody 2248 (IGHV3-48)
AGWYYGRENY

SEQ ID NO: 4497 - protein, 9 aa, Homo sapiens
  Light chain CDR3 for antibody 2249 (IGKV1-39)
QQSYSTPRT

SEQ ID NO: 4498 - protein, 19 aa, Homo sapiens
  Heavy chain CDR3 for antibody 2249 (IGHV4-b)
ARSGRYYDSSASRPHYFDY

SEQ ID NO: 4499 - protein, 9 aa, Homo sapiens
  Light chain CDR3 for antibody 2250 (IGKV1-8)
QQYYSYPPT

SEQ ID NO: 4500 - protein, 11 aa, Homo sapiens
  Heavy chain CDR3 for antibody 2250 (IGHV4-34)
ATGTSYYYMDV

SEQ ID NO: 4501 - protein, 9 aa, Homo sapiens
  Light chain CDR3 for antibody 2251 (IGKV1-39)
QQSYYDHWT

SEQ ID NO: 4502 - protein, 12 aa, Homo sapiens
  Heavy chain CDR3 for antibody 2251 (IGHV4-34)
ARANLTYGSGNF

SEQ ID NO: 4503 - protein, 10 aa, Homo sapiens
  Light chain CDR3 for antibody 2252 (IGKV5-2)
LQHDNFPPRT

SEQ ID NO: 4504 - protein, 11 aa, Homo sapiens
  Heavy chain CDR3 for antibody 2252 (IGHV4-34)
ATGTSYYYMDV

SEQ ID NO: 4505 - protein, 9 aa, Homo sapiens
  Light chain CDR3 for antibody 2253 (IGKV1-39)
QQSDSAPWT

SEQ ID NO: 4506 - protein, 23 aa, Homo sapiens
  Heavy chain CDR3 for antibody 2253 (IGHV4-4)
VKVGPIVVVPDDEIFGDADAFEV

SEQ ID NO: 4507 - protein, 10 aa, Homo sapiens
  Light chain CDR3 for antibody 2254 (IGKV3-20)
QQYGSSPPYS

SEQ ID NO: 4508 - protein, 11 aa, Homo sapiens
  Heavy chain CDR3 for antibody 2254 (IGHV1-8)
ARVIKGGHSDC

SEQ ID NO: 4509 - protein, 9 aa, Homo sapiens
  Light chain CDR3 for antibody 2255 (IGKV3-15)
QQYNKWPPT

SEQ ID NO: 4510 - protein, 12 aa, Homo sapiens
  Heavy chain CDR3 for antibody 2255 (IGHV2-5)
VVVGNFYRPFDY

SEQ ID NO: 4511 - protein, 8 aa, Homo sapiens
  Light chain CDR3 for antibody 2256 (IGKV3-20)
QQYGSSLT

SEQ ID NO: 4512 - protein, 12 aa, Homo sapiens
  Heavy chain CDR3 for antibody 2256 (IGHV3-66)
ARDLGMGSYFDY

SEQ ID NO: 4513 - protein, 9 aa, Homo sapiens
  Light chain CDR3 for antibody 2257 (IGKV3-20)
QQYGSSPWT

SEQ ID NO: 4514 - protein, 11 aa, Homo sapiens
  Heavy chain CDR3 for antibody 2257 (IGHV3-66)
ARDYGDFYSDY

SEQ ID NO: 4515 - protein, 9 aa, Homo sapiens
  Light chain CDR3 for antibody 2258 (IGKV1-9)
QHLSGYPRT

SEQ ID NO: 4516 - protein, 17 aa, Homo sapiens
  Heavy chain CDR3 for antibody 2258 (IGHV1-69)
VSVMGGFDFGEPRPLEY

SEQ ID NO: 4517 - protein, 9 aa, Homo sapiens
  Light chain CDR3 for antibody 2259 (IGKV1-33)
QQYGDLPYS

SEQ ID NO: 4518 - protein, 14 aa, Homo sapiens
  Heavy chain CDR3 for antibody 2259 (IGHV3-h)
ARARTTLQLELFDY

SEQ ID NO: 4519 - protein, 9 aa, Homo sapiens
  Light chain CDR3 for antibody 2260 (IGKV1-39)
QQSYSTLLT

SEQ ID NO: 4520 - protein, 16 aa, Homo sapiens
  Heavy chain CDR3 for antibody 2260 (IGHV4-4)
ARAPSVPAAIFDAFDI

SEQ ID NO: 4521 - protein, 9 aa, Homo sapiens
  Light chain CDR3 for antibody 2261 (IGKV1-27)
QKYNSAPYT

SEQ ID NO: 4522 - protein, 19 aa, Homo sapiens
  Heavy chain CDR3 for antibody 2261 (IGHV5-a)
ARRFRECRGNMCYPYWFDH

SEQ ID NO: 4523 - protein, 9 aa, Homo sapiens
  Light chain CDR3 for antibody 2262 (IGKV3-20)
QQYGSSPWT

SEQ ID NO: 4524 - protein, 16 aa, Homo sapiens
  Heavy chain CDR3 for antibody 2262 (IGHV1-58)
AAPYCSSASCHDAFDV

SEQ ID NO: 4525 - protein, 7 aa, Homo sapiens
  Light chain CDR3 for antibody 2263 (IGKV3-11)
QQRSNWT

SEQ ID NO: 4526 - protein, 17 aa, Homo sapiens
  Heavy chain CDR3 for antibody 2263 (IGHV2-70)
ARIRYDILTGYSSYFDY

SEQ ID NO: 4527 - protein, 10 aa, Homo sapiens
  Light chain CDR3 for antibody 2264 (IGKV1D-12)
QQSYSTPSLT

SEQ ID NO: 4528 - protein, 22 aa, Homo sapiens
  Heavy chain CDR3 for antibody 2264 (IGHV1-69)
ARDALLREYQLLSNAGYYYMDV

SEQ ID NO: 4529 - protein, 9 aa, Homo sapiens
  Light chain CDR3 for antibody 2265 (IGKV1-27)
QKYNSAPQT

SEQ ID NO: 4530 - protein, 14 aa, Homo sapiens
  Heavy chain CDR3 for antibody 2265 (IGHV3-48)
ARDRRDGGYPNCDR

SEQ ID NO: 4531 - protein, 8 aa, Homo sapiens
  Light chain CDR3 for antibody 2266 (IGKV3-20)
QQYGSSRT

SEQ ID NO: 4532 - protein, 12 aa, Homo sapiens
  Heavy chain CDR3 for antibody 2266 (IGHV1-69)
AAYSASWDVTDY

SEQ ID NO: 4533 - protein, 9 aa, Homo sapiens
  Light chain CDR3 for antibody 2267 (IGKV3-20)
QQYGGSSGT

SEQ ID NO: 4534 - protein, 14 aa, Homo sapiens
  Heavy chain CDR3 for antibody 2267 (IGHV1-18)
ARDDFGVLLSYMDV

SEQ ID NO: 4535 - protein, 9 aa, Homo sapiens
  Light chain CDR3 for antibody 2268 (IGKV1-5)
QQHASNPLT

SEQ ID NO: 4536 - protein, 12 aa, Homo sapiens
  Heavy chain CDR3 for antibody 2268 (IGHV5-51)
ARRFSSSELFHF

SEQ ID NO: 4537 - protein, 9 aa, Homo sapiens
  Light chain CDR3 for antibody 2269 (IGKV1-33)
QQYDNLPLT

SEQ ID NO: 4538 - protein, 22 aa, Homo sapiens
  Heavy chain CDR3 for antibody 2269 (IGHV1-8)
ARGQESGAIFGVVIIRARGFDY

SEQ ID NO: 4539 - protein, 10 aa, Homo sapiens
  Light chain CDR3 for antibody 2270 (IGKV2-30)
IQSTHCPSCT

SEQ ID NO: 4540 - protein, 10 aa, Homo sapiens
  Heavy chain CDR3 for antibody 2270 (IGHV5-51)
ARHGPLPFDY

SEQ ID NO: 4541 - protein, 9 aa, Homo sapiens
  Light chain CDR3 for antibody 2271 (IGKV1-33)
QQYDNLPLT

SEQ ID NO: 4542 - protein, 12 aa, Homo sapiens
  Heavy chain CDR3 for antibody 2271 (IGHV1-69)
ATYSTSWHVTDY

SEQ ID NO: 4543 - protein, 9 aa, Homo sapiens
  Light chain CDR3 for antibody 2272 (IGKV3D-20)
QQYGSSPLT

SEQ ID NO: 4544 - protein, 14 aa, Homo sapiens
  Heavy chain CDR3 for antibody 2272 (IGHV1-69)
ARHPYSYDFYYMDV

SEQ ID NO: 4545 - protein, 8 aa, Homo sapiens
  Light chain CDR3 for antibody 2273 (IGKV1-39)
QQSYRTWT

SEQ ID NO: 4546 - protein, 12 aa, Homo sapiens
  Heavy chain CDR3 for antibody 2273 (IGHV4-34)
ARANLTYGSGDF

SEQ ID NO: 4547 - protein, 9 aa, Homo sapiens
  Light chain CDR3 for antibody 2274 (IGKV3-20)
QQYSTSLYS

SEQ ID NO: 4548 - protein, 15 aa, Homo sapiens
  Heavy chain CDR3 for antibody 2274 (IGHV5-a)
ARRLYEWSPHSGFDP

SEQ ID NO: 4549 - protein, 9 aa, Homo sapiens
  Light chain CDR3 for antibody 2275 (IGKV1-5)
QQYNSYPWT

SEQ ID NO: 4550 - protein, 12 aa, Homo sapiens
  Heavy chain CDR3 for antibody 2275 (IGHV3-49)
TRDDFWSGYYSY

SEQ ID NO: 4551 - protein, 9 aa, Homo sapiens
  Light chain CDR3 for antibody 2276 (IGKV1-39)
QQSYSTPRT

SEQ ID NO: 4552 - protein, 15 aa, Homo sapiens
  Heavy chain CDR3 for antibody 2276 (IGHV2-5)
AHGGTMIVAYGAFDI

SEQ ID NO: 4553 - protein, 9 aa, Homo sapiens
  Light chain CDR3 for antibody 2277 (IGKV3-20)
QQYDKPPWT

SEQ ID NO: 4554 - protein, 14 aa, Homo sapiens
  Heavy chain CDR3 for antibody 2277 (IGHV1-69)
GRQELEAMGEFFQH

SEQ ID NO: 4555 - protein, 9 aa, Homo sapiens
  Light chain CDR3 for antibody 2278 (IGKV1-9)
QQLNTYPIT

SEQ ID NO: 4556 - protein, 18 aa, Homo sapiens
  Heavy chain CDR3 for antibody 2278 (IGHV3-33)
LRADCASPGCQGRDIFDI

SEQ ID NO: 4557 - protein, 9 aa, Homo sapiens
  Light chain CDR3 for antibody 2279 (IGKV1-27)
QKYNSAPRT

SEQ ID NO: 4558 - protein, 16 aa, Homo sapiens
  Heavy chain CDR3 for antibody 2279 (IGHV1-58)
AAPYCSSTSCHDAFDI

SEQ ID NO: 4559 - protein, 9 aa, Homo sapiens
  Light chain CDR3 for antibody 2280 (IGKV1-39)
QQVSSTRIT

SEQ ID NO: 4560 - protein, 15 aa, Homo sapiens
  Heavy chain CDR3 for antibody 2280 (IGHV4-39)
ARARPVASRPFFFDF

SEQ ID NO: 4561 - protein, 8 aa, Homo sapiens
  Light chain CDR3 for antibody 2281 (IGKV1-39)
QQSYRTWT

SEQ ID NO: 4562 - protein, 19 aa, Homo sapiens
  Heavy chain CDR3 for antibody 2281 (IGHV4-31)
ARGVPVAIIGVAAYYYMDV

SEQ ID NO: 4563 - protein, 9 aa, Homo sapiens
  Light chain CDR3 for antibody 2282 (IGKV1-39)
QQSYSTPRT

SEQ ID NO: 4564 - protein, 21 aa, Homo sapiens
  Heavy chain CDR3 for antibody 2282 (IGHV4-39)
ARDHPGDSSGYYGPYYYYMDV

SEQ ID NO: 4565 - protein, 9 aa, Homo sapiens
  Light chain CDR3 for antibody 2283 (IGKV1-5)
QQSKTYLND

SEQ ID NO: 4566 - protein, 20 aa, Homo sapiens
  Heavy chain CDR3 for antibody 2283 (IGHV1-69)
ARDGTKGIAAAGTHIPAMDV

SEQ ID NO: 4567 - protein, 9 aa, Homo sapiens
  Light chain CDR3 for antibody 2284 (IGKV3-11)
QQRSNWPWT

SEQ ID NO: 4568 - protein, 9 aa, Homo sapiens
  Heavy chain CDR3 for antibody 2284 (IGHV3-64)
VGPAITAAP

SEQ ID NO: 4569 - protein, 9 aa, Homo sapiens
  Light chain CDR3 for antibody 2285 (IGKV1-5)
QQYNSYWWT

SEQ ID NO: 4570 - protein, 12 aa, Homo sapiens
  Heavy chain CDR3 for antibody 2285 (IGHV4-34)
ARGPTRSRRLTV

SEQ ID NO: 4571 - protein, 8 aa, Homo sapiens
  Light chain CDR3 for antibody 2286 (IGKV3-20)
QQYGSSRT

SEQ ID NO: 4572 - protein, 12 aa, Homo sapiens
  Heavy chain CDR3 for antibody 2286 (IGHV1-69)
ATYSASWRGTDY

SEQ ID NO: 4573 - protein, 9 aa, Homo sapiens
  Light chain CDR3 for antibody 2287 (IGKV1-5)
QQYNSYSWT

SEQ ID NO: 4574 - protein, 9 aa, Homo sapiens
  Heavy chain CDR3 for antibody 2287 (IGHV3-21)
ARGWDYFDY

SEQ ID NO: 4575 - protein, 9 aa, Homo sapiens
  Light chain CDR3 for antibody 2288 (IGKV3-20)
QQYGSSPWT

SEQ ID NO: 4576 - protein, 16 aa, Homo sapiens
  Heavy chain CDR3 for antibody 2288 (IGHV1-58)
AAPYCSSAGGHDAFDI

SEQ ID NO: 4577 - protein, 9 aa, Homo sapiens
  Light chain CDR3 for antibody 2289 (IGKV1-33)
QQYDNLPLT

SEQ ID NO: 4578 - protein, 12 aa, Homo sapiens
  Heavy chain CDR3 for antibody 2289 (IGHV1-8)
ARATRYQLVSDP

SEQ ID NO: 4579 - protein, 8 aa, Homo sapiens
  Light chain CDR3 for antibody 2290 (IGKV3-11)
QQRSNWLT

SEQ ID NO: 4580 - protein, 13 aa, Homo sapiens
  Heavy chain CDR3 for antibody 2290 (IGHV1-3)
ARDNGDSGWAFDY

SEQ ID NO: 4581 - protein, 9 aa, Homo sapiens
  Light chain CDR3 for antibody 2291 (IGKV1-39)
QQTYSSSIT

SEQ ID NO: 4582 - protein, 16 aa, Homo sapiens
  Heavy chain CDR3 for antibody 2291 (IGHV4-b)
ARLGQWLVLRNDGLDI

SEQ ID NO: 4583 - protein, 9 aa, Homo sapiens
  Light chain CDR3 for antibody 2292 (IGKV1-39)
QQSYSNPLA

SEQ ID NO: 4584 - protein, 12 aa, Homo sapiens
  Heavy chain CDR3 for antibody 2292 (IGHV1-69)
AAGSGSSWYSDY

SEQ ID NO: 4585 - protein, 9 aa, Homo sapiens
  Light chain CDR3 for antibody 2293 (IGKV1D-12)
QQSYNNPRT

SEQ ID NO: 4586 - protein, 18 aa, Homo sapiens
  Heavy chain CDR3 for antibody 2293 (IGHV3-74)
ARVKTTTGSGWYGDAFDV

SEQ ID NO: 4587 - protein, 9 aa, Homo sapiens
  Light chain CDR3 for antibody 2294 (IGKV1-39)
QQSYSTLLT

SEQ ID NO: 4588 - protein, 21 aa, Homo sapiens
  Heavy chain CDR3 for antibody 2294 (IGHV4-61)
ARERLVDSQQLAPDYYYGMDV

SEQ ID NO: 4589 - protein, 9 aa, Homo sapiens
  Light chain CDR3 for antibody 2295 (IGKV1-9)
QQLNSYPLT

SEQ ID NO: 4590 - protein, 22 aa, Homo sapiens
  Heavy chain CDR3 for antibody 2295 (IGHV4-34)
ARGTVVKYQLLFSSYFYYYMDV

SEQ ID NO: 4591 - protein, 9 aa, Homo sapiens
  Light chain CDR3 for antibody 2296 (IGKV3-20)
QQYGSSPWT

SEQ ID NO: 4592 - protein, 14 aa, Homo sapiens
  Heavy chain CDR3 for antibody 2296 (IGHV3-h)
ARARTTLQLELFDY

SEQ ID NO: 4593 - protein, 10 aa, Homo sapiens
  Light chain CDR3 for antibody 2297 (IGKV3-20)
QQYGTSPPGT

SEQ ID NO: 4594 - protein, 11 aa, Homo sapiens
  Heavy chain CDR3 for antibody 2297 (IGHV5-51)
ARLRYYDYMDV

SEQ ID NO: 4595 - protein, 8 aa, Homo sapiens
  Light chain CDR3 for antibody 2298 (IGKV3-20)
QQYGSSRT

SEQ ID NO: 4596 - protein, 11 aa, Homo sapiens
  Heavy chain CDR3 for antibody 2298 (IGHV3-53)
ARDRPGGLHDY

SEQ ID NO: 4597 - protein, 9 aa, Homo sapiens
  Light chain CDR3 for antibody 2299 (IGKV3-20)
QQYGSSPQT

SEQ ID NO: 4598 - protein, 27 aa, Homo sapiens
  Heavy chain CDR3 for antibody 2299 (IGHV1-18)
ARDSYRVIVVVPAAIDDERYYYYGMDV

SEQ ID NO: 4599 - protein, 9 aa, Homo sapiens
  Light chain CDR3 for antibody 2300 (IGKV1-39)
QQSHSTPYT

SEQ ID NO: 4600 - protein, 14 aa, Homo sapiens
  Heavy chain CDR3 for antibody 2300 (IGHV4-30-2)
ARDGFSGYDNWFDP

SEQ ID NO: 4601 - protein, 9 aa, Homo sapiens
  Light chain CDR3 for antibody 2301 (IGKV1-27)
QKYNSAPYT

SEQ ID NO: 4602 - protein, 16 aa, Homo sapiens
  Heavy chain CDR3 for antibody 2301 (IGHV1-46)
ARGSATIYGVVLPFDF

SEQ ID NO: 4603 - protein, 9 aa, Homo sapiens
  Light chain CDR3 for antibody 2302 (IGKV1-5)
QQYSNDSRT

SEQ ID NO: 4604 - protein, 18 aa, Homo sapiens
  Heavy chain CDR3 for antibody 2302 (IGHV4-59)
ARSPGLIFGVVGRHYFDH

SEQ ID NO: 4605 - protein, 9 aa, Homo sapiens
  Light chain CDR3 for antibody 2303 (IGKV1-39)
QQSYSTLIT

SEQ ID NO: 4606 - protein, 16 aa, Homo sapiens
  Heavy chain CDR3 for antibody 2303 (IGHV3-64)
AKDHCSSATCSYAFDI

SEQ ID NO: 4607 - protein, 9 aa, Homo sapiens
  Light chain CDR3 for antibody 2304 (IGKV1-39)
QQSYSNPLA

SEQ ID NO: 4608 - protein, 19 aa, Homo sapiens
  Heavy chain CDR3 for antibody 2304 (IGHV1-18)
AGGTYDWNNGVPLPDAFDM

SEQ ID NO: 4609 - protein, 9 aa, Homo sapiens
  Light chain CDR3 for antibody 2305 (IGKV1-39)
QQSYNMPPT

SEQ ID NO: 4610 - protein, 11 aa, Homo sapiens
  Heavy chain CDR3 for antibody 2305 (IGHV3-66)
ARDYGDFYSDY

SEQ ID NO: 4611 - protein, 9 aa, Homo sapiens
  Light chain CDR3 for antibody 2306 (IGKV1-33)
QQYDNLPFT

SEQ ID NO: 4612 - protein, 18 aa, Homo sapiens
  Heavy chain CDR3 for antibody 2306 (IGHV4-30-2)
ARSFADVLTDYPLSPLGV

SEQ ID NO: 4613 - protein, 8 aa, Homo sapiens
  Light chain CDR3 for antibody 2307 (IGKV2D-28)
MQALQTIT

SEQ ID NO: 4614 - protein, 12 aa, Homo sapiens
  Heavy chain CDR3 for antibody 2307 (IGHV2-5)
AHRISWGLAFDI

SEQ ID NO: 4615 - protein, 9 aa, Homo sapiens
  Light chain CDR3 for antibody 2308 (IGKV3-20)
QQYGSSPWT

SEQ ID NO: 4616 - protein, 16 aa, Homo sapiens
  Heavy chain CDR3 for antibody 2308 (IGHV1-58)
AAPYCSSASWHDAFDI

SEQ ID NO: 4617 - protein, 9 aa, Homo sapiens
  Light chain CDR3 for antibody 2309 (IGKV2-30)
MQGSHWPPT

SEQ ID NO: 4618 - protein, 17 aa, Homo sapiens
  Heavy chain CDR3 for antibody 2309 (IGHV4-b)
ARHPVQFLDWLFWYFDL

SEQ ID NO: 4619 - protein, 9 aa, Homo sapiens
  Light chain CDR3 for antibody 2310 (IGKV1-33)
QQYDNLPLT

SEQ ID NO: 4620 - protein, 16 aa, Homo sapiens
  Heavy chain CDR3 for antibody 2310 (IGHV1-58)
AAPYCSSTSCHDAFDI

SEQ ID NO: 4621 - protein, 9 aa, Homo sapiens
  Light chain CDR3 for antibody 2311 (IGKV3-20)
QQYGSSPWT

SEQ ID NO: 4622 - protein, 16 aa, Homo sapiens
  Heavy chain CDR3 for antibody 2311 (IGHV1-58)
AAAYCSSGSCDDAFDV

SEQ ID NO: 4623 - protein, 9 aa, Homo sapiens
  Light chain CDR3 for antibody 2312 (IGKV1-5)
QQYDTYPYS

SEQ ID NO: 4624 - protein, 9 aa, Homo sapiens
  Heavy chain CDR3 for antibody 2312 (IGHV3-21)
ARGWDYFDY

SEQ ID NO: 4625 - protein, 9 aa, Homo sapiens
  Light chain CDR3 for antibody 2313 (IGKV3-20)
QQYGSSPWT

SEQ ID NO: 4626 - protein, 16 aa, Homo sapiens
  Heavy chain CDR3 for antibody 2313 (IGHV6-1)
AREGVHGYSGHRPIDN

SEQ ID NO: 4627 - protein, 9 aa, Homo sapiens
  Light chain CDR3 for antibody 2314 (IGKV1-39)
QQSYSTLLT

SEQ ID NO: 4628 - protein, 20 aa, Homo sapiens
  Heavy chain CDR3 for antibody 2314 (IGHV3-53)
ARGAYGDYVRWSYYYYYMDV

SEQ ID NO: 4629 - protein, 9 aa, Homo sapiens
  Light chain CDR3 for antibody 2315 (IGKV1-9)
QQLDAYPFT

SEQ ID NO: 4630 - protein, 13 aa, Homo sapiens
  Heavy chain CDR3 for antibody 2315 (IGHV1-8)
ARASQIVPTVNNY

SEQ ID NO: 4631 - protein, 9 aa, Homo sapiens
  Light chain CDR3 for antibody 2316 (IGKV3-11)
QQRSNWPFP

SEQ ID NO: 4632 - protein, 10 aa, Homo sapiens
  Heavy chain CDR3 for antibody 2316 (IGHV3-53)
ARDIGEGVGP

SEQ ID NO: 4633 - protein, 9 aa, Homo sapiens
  Light chain CDR3 for antibody 2317 (IGKV1-33)
QQYDNLPFT

SEQ ID NO: 4634 - protein, 15 aa, Homo sapiens
  Heavy chain CDR3 for antibody 2317 (IGHV3-30)
ATDPPSSWSGYPLDY

SEQ ID NO: 4635 - protein, 9 aa, Homo sapiens
  Light chain CDR3 for antibody 2318 (IGKV4-1)
QQYYSTPRT

SEQ ID NO: 4636 - protein, 12 aa, Homo sapiens
  Heavy chain CDR3 for antibody 2318 (IGHV4-61)
ARDNENEFMIDS

SEQ ID NO: 4637 - protein, 8 aa, Homo sapiens
  Light chain CDR3 for antibody 2319 (IGKV3-20)
QQYGSSRT

SEQ ID NO: 4638 - protein, 12 aa, Homo sapiens
  Heavy chain CDR3 for antibody 2319 (IGHV1-69)
ATYSAIWRVADY

SEQ ID NO: 4639 - protein, 9 aa, Homo sapiens
  Light chain CDR3 for antibody 2320 (IGKV1-27)
QKYNSAPRT

SEQ ID NO: 4640 - protein, 12 aa, Homo sapiens
  Heavy chain CDR3 for antibody 2320 (IGHV1-69)
ASVDSSKDAFDI

SEQ ID NO: 4641 - protein, 9 aa, Homo sapiens
  Light chain CDR3 for antibody 2321 (IGKV3-20)
QQYGSSPWT

SEQ ID NO: 4642 - protein, 16 aa, Homo sapiens
  Heavy chain CDR3 for antibody 2321 (IGHV1-58)
AAAYCSSTSCDDAFDI

SEQ ID NO: 4643 - protein, 9 aa, Homo sapiens
  Light chain CDR3 for antibody 2322 (IGKV1-39)
LQAYTFPIT

SEQ ID NO: 4644 - protein, 15 aa, Homo sapiens
  Heavy chain CDR3 for antibody 2322 (IGHV3-21)
VSDVRRGDSYGWFDP

SEQ ID NO: 4645 - protein, 8 aa, Homo sapiens
  Light chain CDR3 for antibody 2323 (IGKV3-20)
QQYGSSRT

SEQ ID NO: 4646 - protein, 12 aa, Homo sapiens
  Heavy chain CDR3 for antibody 2323 (IGHV1-69)
APYSPSWHVNDY

SEQ ID NO: 4647 - protein, 9 aa, Homo sapiens
  Light chain CDR3 for antibody 2324 (IGKV1-39)
QQSHRTPWT

SEQ ID NO: 4648 - protein, 9 aa, Homo sapiens
  Heavy chain CDR3 for antibody 2324 (IGHV1-69)
ARDGMGADY

SEQ ID NO: 4649 - protein, 9 aa, Homo sapiens
  Light chain CDR3 for antibody 2325 (IGKV1-33)
QQYDQRPPT

SEQ ID NO: 4650 - protein, 14 aa, Homo sapiens
  Heavy chain CDR3 for antibody 2325 (IGHV1-69)
ARDRDDFWFGGMDV

SEQ ID NO: 4651 - protein, 9 aa, Homo sapiens
  Light chain CDR3 for antibody 2326 (IGKV1-39)
QQSHRTPWT

SEQ ID NO: 4652 - protein, 19 aa, Homo sapiens
  Heavy chain CDR3 for antibody 2326 (IGHV1-69)
ARAPTQIHLWEPVRGGFEY

SEQ ID NO: 4653 - protein, 9 aa, Homo sapiens
  Light chain CDR3 for antibody 2327 (IGKV1-39)
QQSYSTPPT

SEQ ID NO: 4654 - protein, 11 aa, Homo sapiens
  Heavy chain CDR3 for antibody 2327 (IGHV3-11)
ARPGTSWAFDS

SEQ ID NO: 4655 - protein, 9 aa, Homo sapiens
  Light chain CDR3 for antibody 2328 (IGKV4-1)
QQYYSTPWT

SEQ ID NO: 4656 - protein, 18 aa, Homo sapiens
  Heavy chain CDR3 for antibody 2328 (IGHV1-3)
ARSNIMVGIRGKRSPFEY

SEQ ID NO: 4657 - protein, 9 aa, Homo sapiens
  Light chain CDR3 for antibody 2329 (IGKV3-20)
QQYGSSPWT

SEQ ID NO: 4658 - protein, 16 aa, Homo sapiens
  Heavy chain CDR3 for antibody 2329 (IGHV3-30)
AKNGYSYGYGFYYFDY

SEQ ID NO: 4659 - protein, 9 aa, Homo sapiens
  Light chain CDR3 for antibody 2330 (IGKV3-20)
QQYGSSPWT

SEQ ID NO: 4660 - protein, 16 aa, Homo sapiens
  Heavy chain CDR3 for antibody 2330 (IGHV1-58)
AAQYCSSPSCHDAFDI

SEQ ID NO: 4661 - protein, 9 aa, Homo sapiens
  Light chain CDR3 for antibody 2331 (IGKV3-20)
QQYGSSPWT

SEQ ID NO: 4662 - protein, 16 aa, Homo sapiens
  Heavy chain CDR3 for antibody 2331 (IGHV1-58)
AEPYCSSPSCHDAFDI

SEQ ID NO: 4663 - protein, 10 aa, Homo sapiens
  Light chain CDR3 for antibody 2332 (IGKV1-9)
QQLNSYPPIT

SEQ ID NO: 4664 - protein, 16 aa, Homo sapiens
  Heavy chain CDR3 for antibody 2332 (IGHV3-33)
ARNLGSGSYVRGPFDY

SEQ ID NO: 4665 - protein, 9 aa, Homo sapiens
  Light chain CDR3 for antibody 2333 (IGKV1-5)
QQYNSYSDT

SEQ ID NO: 4666 - protein, 12 aa, Homo sapiens
  Heavy chain CDR3 for antibody 2333 (IGHV1-69)
ATYSTSWHVTDY

SEQ ID NO: 4667 - protein, 10 aa, Homo sapiens
  Light chain CDR3 for antibody 2334 (IGKV1-5)
QQYYDYSGST

SEQ ID NO: 4668 - protein, 23 aa, Homo sapiens
  Heavy chain CDR3 for antibody 2334 (IGHV7-4-1)
ARNRGRDVWSDHYGEQHSDFFDL

SEQ ID NO: 4669 - protein, 9 aa, Homo sapiens
  Light chain CDR3 for antibody 2335 (IGKV3-20)
QQYGSSPWT

SEQ ID NO: 4670 - protein, 16 aa, Homo sapiens
  Heavy chain CDR3 for antibody 2335 (IGHV1-58)
AAPYCSSTSCHGGFDI

SEQ ID NO: 4671 - protein, 9 aa, Homo sapiens
  Light chain CDR3 for antibody 2336 (IGKV3-20)
QQYGSSPWT

SEQ ID NO: 4672 - protein, 16 aa, Homo sapiens
  Heavy chain CDR3 for antibody 2336 (IGHV1-58)
AAPYCSSASCHYSFDI

SEQ ID NO: 4673 - protein, 9 aa, Homo sapiens
  Light chain CDR3 for antibody 2337 (IGKV1-33)
QQHDDLPYT

SEQ ID NO: 4674 - protein, 20 aa, Homo sapiens
  Heavy chain CDR3 for antibody 2337 (IGHV4-61)
ARVVGGITSVGPVAPNYFDY

SEQ ID NO: 4675 - protein, 8 aa, Homo sapiens
  Light chain CDR3 for antibody 2338 (IGKV3-20)
QQYGSSRT

SEQ ID NO: 4676 - protein, 12 aa, Homo sapiens
  Heavy chain CDR3 for antibody 2338 (IGHV1-18)
ARDGGPLETFDY

SEQ ID NO: 4677 - protein, 7 aa, Homo sapiens
  Light chain CDR3 for antibody 2339 (IGKV3-20)
QQYGSSL

SEQ ID NO: 4678 - protein, 11 aa, Homo sapiens
  Heavy chain CDR3 for antibody 2339 (IGHV3-53)
ARGQWEYYFDY

SEQ ID NO: 4679 - protein, 9 aa, Homo sapiens
  Light chain CDR3 for antibody 2340 (IGKV3-20)
QQYGSSPWT

SEQ ID NO: 4680 - protein, 16 aa, Homo sapiens
  Heavy chain CDR3 for antibody 2340 (IGHV1-58)
AAPYCSSTNYHDSFDI

SEQ ID NO: 4681 - protein, 9 aa, Homo sapiens
  Light chain CDR3 for antibody 2341 (IGKV1-39)
QQSDSAPWT

SEQ ID NO: 4682 - protein, 15 aa, Homo sapiens
  Heavy chain CDR3 for antibody 2341 (IGHV1-18)
ARSHLYYDFWSGYKV

SEQ ID NO: 4683 - protein, 8 aa, Homo sapiens
  Light chain CDR3 for antibody 2342 (IGKV3-20)
QQYGSSRT

SEQ ID NO: 4684 - protein, 12 aa, Homo sapiens
  Heavy chain CDR3 for antibody 2342 (IGHV1-69)
ASYSASWHGTDY

SEQ ID NO: 4685 - protein, 9 aa, Homo sapiens
  Light chain CDR3 for antibody 2343 (IGKV1-33)
QQYDNLPLT

SEQ ID NO: 4686 - protein, 22 aa, Homo sapiens
  Heavy chain CDR3 for antibody 2343 (IGHV1-69)
ARDALLREYQLLSNAGYYYMDV

SEQ ID NO: 4687 - protein, 8 aa, Homo sapiens
  Light chain CDR3 for antibody 2344 (IGKV1-33)
QHYDSLPV

SEQ ID NO: 4688 - protein, 18 aa, Homo sapiens
  Heavy chain CDR3 for antibody 2344 (IGHV1-69)
ARDVRLCNSNRCYGPFDN

SEQ ID NO: 4689 - protein, 9 aa, Homo sapiens
  Light chain CDR3 for antibody 2345 (IGKV1-39)
QQTYNTPYT

SEQ ID NO: 4690 - protein, 18 aa, Homo sapiens
  Heavy chain CDR3 for antibody 2345 (IGHV4-b)
ARGVTTAVFYYFYYYMDV

SEQ ID NO: 4691 - protein, 9 aa, Homo sapiens
  Light chain CDR3 for antibody 2346 (IGKV1-39)
QQSYSTPRT

SEQ ID NO: 4692 - protein, 16 aa, Homo sapiens
  Heavy chain CDR3 for antibody 2346 (IGHV4-34)
ARDGRIHSYGHDYFDY

SEQ ID NO: 4693 - protein, 9 aa, Homo sapiens
  Light chain CDR3 for antibody 2347 (IGKV3-20)
QQYGSSPWT

SEQ ID NO: 4694 - protein, 16 aa, Homo sapiens
  Heavy chain CDR3 for antibody 2347 (IGHV1-58)
AGPYCSSASCHEAFDI

SEQ ID NO: 4695 - protein, 9 aa, Homo sapiens
  Light chain CDR3 for antibody 2348 (IGKV3-20)
QQYDSSPRT

SEQ ID NO: 4696 - protein, 12 aa, Homo sapiens
  Heavy chain CDR3 for antibody 2348 (IGHV4-61)
ARDRRGSGWYVD

SEQ ID NO: 4697 - protein, 8 aa, Homo sapiens
  Light chain CDR3 for antibody 2349 (IGKV1-39)
QQSYSTLT

SEQ ID NO: 4698 - protein, 22 aa, Homo sapiens
  Heavy chain CDR3 for antibody 2349 (IGHV4-34)
ARGAVVEYQLLFSSYFYYYMDV

SEQ ID NO: 4699 - protein, 9 aa, Homo sapiens
  Light chain CDR3 for antibody 2350 (IGKV4-1)
QQYYSTPPT

SEQ ID NO: 4700 - protein, 16 aa, Homo sapiens
  Heavy chain CDR3 for antibody 2350 (IGHV3-30)
AKNGYSYGYGFYYFDY

SEQ ID NO: 4701 - protein, 9 aa, Homo sapiens
  Light chain CDR3 for antibody 2351 (IGKV3-20)
QQYGSSPWT

SEQ ID NO: 4702 - protein, 11 aa, Homo sapiens
  Heavy chain CDR3 for antibody 2351 (IGHV1-58)
SSTSCHDAFDI

SEQ ID NO: 4703 - protein, 9 aa, Homo sapiens
  Light chain CDR3 for antibody 2352 (IGKV3-20)
QQYGSSPWT

SEQ ID NO: 4704 - protein, 11 aa, Homo sapiens
  Heavy chain CDR3 for antibody 2352 (IGHV1-2)
AGALVNPTLDR

SEQ ID NO: 4705 - protein, 9 aa, Homo sapiens
  Light chain CDR3 for antibody 2353 (IGKV3-11)
QQGSSRPLT

SEQ ID NO: 4706 - protein, 12 aa, Homo sapiens
  Heavy chain CDR3 for antibody 2353 (IGHV3-66)
ARDLGMGSYFDY

SEQ ID NO: 4707 - protein, 8 aa, Homo sapiens
  Light chain CDR3 for antibody 2354 (IGKV3-20)
QQYGSSRT

SEQ ID NO: 4708 - protein, 9 aa, Homo sapiens
  Heavy chain CDR3 for antibody 2354 (IGHV3-64)
VGPAITAAP

SEQ ID NO: 4709 - protein, 9 aa, Homo sapiens
  Light chain CDR3 for antibody 2355 (IGKV1-33)
QQYDNLPLT

SEQ ID NO: 4710 - protein, 11 aa, Homo sapiens
  Heavy chain CDR3 for antibody 2355 (IGHV5-a)
AREGETIGYYS

SEQ ID NO: 4711 - protein, 9 aa, Homo sapiens
  Light chain CDR3 for antibody 2356 (IGKV3-20)
HHYGSSPWT

SEQ ID NO: 4712 - protein, 16 aa, Homo sapiens
  Heavy chain CDR3 for antibody 2356 (IGHV1-58)
AAPYCSSTSCHDAFDI

SEQ ID NO: 4713 - protein, 9 aa, Homo sapiens
  Light chain CDR3 for antibody 2357 (IGKV1-39)
QQSYRTPYT

SEQ ID NO: 4714 - protein, 19 aa, Homo sapiens
  Heavy chain CDR3 for antibody 2357 (IGHV1-8)
ATPRGDSSGWYGYYYGMDV

SEQ ID NO: 4715 - protein, 9 aa, Homo sapiens
  Light chain CDR3 for antibody 2358 (IGKV1-33)
QQYDNLPLT

SEQ ID NO: 4716 - protein, 19 aa, Homo sapiens
  Heavy chain CDR3 for antibody 2358 (IGHV5-51)
ARRFRECRGNMCYPYWFDH

SEQ ID NO: 4717 - protein, 9 aa, Homo sapiens
  Light chain CDR3 for antibody 2359 (IGKV1-27)
QKYNSAPRT

SEQ ID NO: 4718 - protein, 12 aa, Homo sapiens
  Heavy chain CDR3 for antibody 2359 (IGHV1-69)
ATYSTSWHVTDY

SEQ ID NO: 4719 - protein, 9 aa, Homo sapiens
  Light chain CDR3 for antibody 2360 (IGKV1-33)
QQYYDLPYS

SEQ ID NO: 4720 - protein, 11 aa, Homo sapiens
  Heavy chain CDR3 for antibody 2360 (IGHV3-53)
ARDRAGGLLDY

SEQ ID NO: 4721 - protein, 9 aa, Homo sapiens
  Light chain CDR3 for antibody 2361 (IGKV3-20)
QQYGSSPWT

SEQ ID NO: 4722 - protein, 16 aa, Homo sapiens
  Heavy chain CDR3 for antibody 2361 (IGHV1-58)
AAAYCSSASCHDAFDI

SEQ ID NO: 4723 - protein, 9 aa, Homo sapiens
  Light chain CDR3 for antibody 2362 (IGKV3-20)
QQYGSSPWT

SEQ ID NO: 4724 - protein, 16 aa, Homo sapiens
  Heavy chain CDR3 for antibody 2362 (IGHV1-58)
AAAYCSSPCCHDAFDI

SEQ ID NO: 4725 - protein, 9 aa, Homo sapiens
  Light chain CDR3 for antibody 2363 (IGKV1-5)
QQYNSYSWT

SEQ ID NO: 4726 - protein, 15 aa, Homo sapiens
  Heavy chain CDR3 for antibody 2363 (IGHV6-1)
ARDDLVGATLGAFDI

SEQ ID NO: 4727 - protein, 9 aa, Homo sapiens
  Light chain CDR3 for antibody 2364 (IGKV1-8)
QQYYVYPRT

SEQ ID NO: 4728 - protein, 16 aa, Homo sapiens
  Heavy chain CDR3 for antibody 2364 (IGHV1-2)
ASGTTIFGVVINWFDP

SEQ ID NO: 4729 - protein, 9 aa, Homo sapiens
  Light chain CDR3 for antibody 2365 (IGKV3D-20)
QQYAYSPTT

SEQ ID NO: 4730 - protein, 11 aa, Homo sapiens
  Heavy chain CDR3 for antibody 2365 (IGHV4-34)
ARVTEAYRDQT

SEQ ID NO: 4731 - protein, 9 aa, Homo sapiens
  Light chain CDR3 for antibody 2366 (IGKV3-20)
QQYGSSPWT

SEQ ID NO: 4732 - protein, 18 aa, Homo sapiens
  Heavy chain CDR3 for antibody 2366 (IGHV1-3)
ARSNIMVGIRGKRSPFEY

SEQ ID NO: 4733 - protein, 9 aa, Homo sapiens
  Light chain CDR3 for antibody 2367 (IGKV1-5)
QQYNTYSWT

SEQ ID NO: 4734 - protein, 14 aa, Homo sapiens
  Heavy chain CDR3 for antibody 2367 (IGHV3-66)
ARDLTAAGHNWFDP

SEQ ID NO: 4735 - protein, 9 aa, Homo sapiens
  Light chain CDR3 for antibody 2368 (IGKV1-33)
QQYGDLPYS

SEQ ID NO: 4736 - protein, 16 aa, Homo sapiens
  Heavy chain CDR3 for antibody 2368 (IGHV3-30)
AKNGYSYGYGFYYFDY

SEQ ID NO: 4737 - protein, 9 aa, Homo sapiens
  Light chain CDR3 for antibody 2369 (IGKV3-20)
QQYGSSPWT

SEQ ID NO: 4738 - protein, 15 aa, Homo sapiens
  Heavy chain CDR3 for antibody 2369 (IGHV1-69)
ARRVAVFGVGGSGDV

SEQ ID NO: 4739 - protein, 9 aa, Homo sapiens
  Light chain CDR3 for antibody 2370 (IGKV1-17)
LQHYNYPWT

SEQ ID NO: 4740 - protein, 11 aa, Homo sapiens
  Heavy chain CDR3 for antibody 2370 (IGHV7-4-1)
TRGGFGTTADY

SEQ ID NO: 4741 - protein, 9 aa, Homo sapiens
  Light chain CDR3 for antibody 2371 (IGKV3-20)
QQYGSSPYT

SEQ ID NO: 4742 - protein, 13 aa, Homo sapiens
  Heavy chain CDR3 for antibody 2371 (IGHV1-69)
AREEGLARDAFDI

SEQ ID NO: 4743 - protein, 9 aa, Homo sapiens
  Light chain CDR3 for antibody 2372 (IGKV3-20)
QQYGSSPWT

SEQ ID NO: 4744 - protein, 14 aa, Homo sapiens
  Heavy chain CDR3 for antibody 2372 (IGHV4-b)
ASGVAAAGTRWFDP

SEQ ID NO: 4745 - protein, 9 aa, Homo sapiens
  Light chain CDR3 for antibody 2373 (IGKV3-20)
QQYGSSMYT

SEQ ID NO: 4746 - protein, 21 aa, Homo sapiens
  Heavy chain CDR3 for antibody 2373 (IGHV4-59)
ARDHPGDSSGYYGPYYYYMDV

SEQ ID NO: 4747 - protein, 9 aa, Homo sapiens
  Light chain CDR3 for antibody 2374 (IGKV1-39)
QQYNSYPPT

SEQ ID NO: 4748 - protein, 17 aa, Homo sapiens
  Heavy chain CDR3 for antibody 2374 (IGHV5-a)
ARRMDSSPGNYYYYMDV

SEQ ID NO: 4749 - protein, 9 aa, Homo sapiens
  Light chain CDR3 for antibody 2375 (IGKV1-39)
QQSHRTPWT

SEQ ID NO: 4750 - protein, 12 aa, Homo sapiens
  Heavy chain CDR3 for antibody 2375 (IGHV1-69)
ATYSTSWHVTDY

SEQ ID NO: 4751 - protein, 8 aa, Homo sapiens
  Light chain CDR3 for antibody 2376 (IGKV3-20)
QQYGSSRT

SEQ ID NO: 4752 - protein, 23 aa, Homo sapiens
  Heavy chain CDR3 for antibody 2376 (IGHV1-8)
ATLEFVVVPAAPGGAHYYYGMDV

SEQ ID NO: 4753 - protein, 9 aa, Homo sapiens
  Light chain CDR3 for antibody 2377 (IGKV3-20)
QQYDSSPRT

SEQ ID NO: 4754 - protein, 13 aa, Homo sapiens
  Heavy chain CDR3 for antibody 2377 (IGHV4-59)
AAYSTGYYNYMDV

SEQ ID NO: 4755 - protein, 9 aa, Homo sapiens
  Light chain CDR3 for antibody 2378 (IGKV6-21)
HQSSRLPQT

SEQ ID NO: 4756 - protein, 17 aa, Homo sapiens
  Heavy chain CDR3 for antibody 2378 (IGHV4-30-2)
ASLDIVLLPASRGTPDY

SEQ ID NO: 4757 - protein, 8 aa, Homo sapiens
  Light chain CDR3 for antibody 2379 (IGKV3-20)
QQYGSSRT

SEQ ID NO: 4758 - protein, 12 aa, Homo sapiens
  Heavy chain CDR3 for antibody 2379 (IGHV1-69)
AAYSTSCHYIDY

SEQ ID NO: 4759 - protein, 9 aa, Homo sapiens
  Light chain CDR3 for antibody 2380 (IGKV6-21)
HQSSSFPIT

SEQ ID NO: 4760 - protein, 21 aa, Homo sapiens
  Heavy chain CDR3 for antibody 2380 (IGHV3-30)
ARDGHYDSSGYHGYYYYYMDV

SEQ ID NO: 4761 - protein, 9 aa, Homo sapiens
  Light chain CDR3 for antibody 2381 (IGKV1-9)
QQLNSYSYT

SEQ ID NO: 4762 - protein, 9 aa, Homo sapiens
  Heavy chain CDR3 for antibody 2381 (IGHV3-53)
ARESYGMDV

SEQ ID NO: 4763 - protein, 9 aa, Homo sapiens
  Light chain CDR3 for antibody 2382 (IGKV1-9)
QQLNSYPQT

SEQ ID NO: 4764 - protein, 11 aa, Homo sapiens
  Heavy chain CDR3 for antibody 2382 (IGHV3-53)
ARDLQVYGMDV

SEQ ID NO: 4765 - protein, 9 aa, Homo sapiens
  Light chain CDR3 for antibody 2383 (IGKV1-39)
QQSYSTPPT

SEQ ID NO: 4766 - protein, 19 aa, Homo sapiens
  Heavy chain CDR3 for antibody 2383 (IGHV1-69)
ARAHRSSTSYRLGINWFDP

SEQ ID NO: 4767 - protein, 9 aa, Homo sapiens
  Light chain CDR3 for antibody 2384 (IGKV1-33)
QQYDNLPLT

SEQ ID NO: 4768 - protein, 13 aa, Homo sapiens
  Heavy chain CDR3 for antibody 2384 (IGHV4-31)
ARDYGGNSAQFGY

SEQ ID NO: 4769 - protein, 9 aa, Homo sapiens
  Light chain CDR3 for antibody 2385 (IGKV1-9)
QQLNSYPPP

SEQ ID NO: 4770 - protein, 11 aa, Homo sapiens
  Heavy chain CDR3 for antibody 2385 (IGHV3-53)
ARDLGPYGMDV

SEQ ID NO: 4771 - protein, 9 aa, Homo sapiens
  Light chain CDR3 for antibody 2386 (IGKV1-33)
QQYDNLPLT

SEQ ID NO: 4772 - protein, 11 aa, Homo sapiens
  Heavy chain CDR3 for antibody 2386 (IGHV3-53)
ARDGRGDLWSY

SEQ ID NO: 4773 - protein, 8 aa, Homo sapiens
  Light chain CDR3 for antibody 2387 (IGKV1-33)
QQYDNLPS

SEQ ID NO: 4774 - protein, 18 aa, Homo sapiens
  Heavy chain CDR3 for antibody 2387 (IGHV1-69)
ARGAGIVGAIGRHSFFNY

SEQ ID NO: 4775 - protein, 9 aa, Homo sapiens
  Light chain CDR3 for antibody 2388 (IGKV3-20)
QQYGSSLYT

SEQ ID NO: 4776 - protein, 16 aa, Homo sapiens
  Heavy chain CDR3 for antibody 2388 (IGHV1-18)
ARANPGAVGYYYGMDV

SEQ ID NO: 4777 - protein, 9 aa, Homo sapiens
  Light chain CDR3 for antibody 2389 (IGKV1-33)
QQYDNLPIT

SEQ ID NO: 4778 - protein, 14 aa, Homo sapiens
  Heavy chain CDR3 for antibody 2389 (IGHV3-23)
AKALAAAGYDAFDI

SEQ ID NO: 4779 - protein, 9 aa, Homo sapiens
  Light chain CDR3 for antibody 2390 (IGKV1-33)
QQYDNLPLT

SEQ ID NO: 4780 - protein, 11 aa, Homo sapiens
  Heavy chain CDR3 for antibody 2390 (IGHV3-53)
ARDLQVYGMDV

SEQ ID NO: 4781 - protein, 9 aa, Homo sapiens
  Light chain CDR3 for antibody 2391 (IGKV1-33)
QQYDNLPLT

SEQ ID NO: 4782 - protein, 9 aa, Homo sapiens
  Heavy chain CDR3 for antibody 2391 (IGHV3-53)
ARESYGMDV

SEQ ID NO: 4783 - protein, 9 aa, Homo sapiens
  Light chain CDR3 for antibody 2392 (IGKV1-9)
QQLNSYPPP

SEQ ID NO: 4784 - protein, 9 aa, Homo sapiens
  Heavy chain CDR3 for antibody 2392 (IGHV3-53)
ARESYGMDV

SEQ ID NO: 4785 - protein, 9 aa, Homo sapiens
  Light chain CDR3 for antibody 2393 (IGKV1-9)
QQLNSYSYT

SEQ ID NO: 4786 - protein, 11 aa, Homo sapiens
  Heavy chain CDR3 for antibody 2393 (IGHV3-53)
ARDLGPYGMDV

SEQ ID NO: 4787 - protein, 9 aa, Homo sapiens
  Light chain CDR3 for antibody 2394 (IGKV1-9)
QQLNSYSYT

SEQ ID NO: 4788 - protein, 19 aa, Homo sapiens
  Heavy chain CDR3 for antibody 2394 (IGHV1-69)
ARAHRSSTSYRLGINWFDP

SEQ ID NO: 4789 - protein, 9 aa, Homo sapiens
  Light chain CDR3 for antibody 2395 (IGKV3-11)
QQRRNWPLT

SEQ ID NO: 4790 - protein, 16 aa, Homo sapiens
  Heavy chain CDR3 for antibody 2395 (IGHV3-23)
AKDRMTAPLHYWYFDL

SEQ ID NO: 4791 - protein, 9 aa, Homo sapiens
  Light chain CDR3 for antibody 2396 (IGKV1-39)
QQSYSTPPT

SEQ ID NO: 4792 - protein, 11 aa, Homo sapiens
  Heavy chain CDR3 for antibody 2396 (IGHV3-53)
ARDLQVYGMDV

SEQ ID NO: 4793 - protein, 9 aa, Homo sapiens
  Light chain CDR3 for antibody 2397 (IGKV1-33)
QQYDNLPLT

SEQ ID NO: 4794 - protein, 19 aa, Homo sapiens
  Heavy chain CDR3 for antibody 2397 (IGHV1-69)
ARAHRSSTSYRLGINWFDP

SEQ ID NO: 4795 - protein, 8 aa, Homo sapiens
  Light chain CDR3 for antibody 2398 (IGKV1-33)
QQYDNLPS

SEQ ID NO: 4796 - protein, 19 aa, Homo sapiens
  Heavy chain CDR3 for antibody 2398 (IGHV1-69)
ARAHRSSTSYRLGINWFDP

SEQ ID NO: 4797 - protein, 9 aa, Homo sapiens
  Light chain CDR3 for antibody 2399 (IGKV1-39)
QQSYSTPPT

SEQ ID NO: 4798 - protein, 13 aa, Homo sapiens
  Heavy chain CDR3 for antibody 2399 (IGHV4-31)
ARDYGGNSAQFGY

SEQ ID NO: 4799 - protein, 10 aa, Homo sapiens
  Light chain CDR3 for antibody 2400 (IGKV3-20)
QQYGSSPPDT

SEQ ID NO: 4800 - protein, 13 aa, Homo sapiens
  Heavy chain CDR3 for antibody 2400 (IGHV5-51)
ARRYSGFHAELDY

SEQ ID NO: 4801 - protein, 9 aa, Homo sapiens
  Light chain CDR3 for antibody 2401 (IGKV1-39)
QQSYSTPPT

SEQ ID NO: 4802 - protein, 9 aa, Homo sapiens
  Heavy chain CDR3 for antibody 2401 (IGHV3-53)
ARESYGMDV

SEQ ID NO: 4803 - protein, 9 aa, Homo sapiens
  Light chain CDR3 for antibody 2402 (IGKV1-39)
QQSYSTPPT

SEQ ID NO: 4804 - protein, 18 aa, Homo sapiens
  Heavy chain CDR3 for antibody 2402 (IGHV1-69)
ARGAGIVGAIGRHSFFNY

SEQ ID NO: 4805 - protein, 9 aa, Homo sapiens
  Light chain CDR3 for antibody 2403 (IGKV1-12)
QQANSFPPT

SEQ ID NO: 4806 - protein, 9 aa, Homo sapiens
  Heavy chain CDR3 for antibody 2403 (IGHV3-53)
ARESYGMDV

SEQ ID NO: 4807 - protein, 9 aa, Homo sapiens
  Light chain CDR3 for antibody 2404 (IGKV1-9)
QQLTSYSYT

SEQ ID NO: 4808 - protein, 11 aa, Homo sapiens
  Heavy chain CDR3 for antibody 2404 (IGHV3-53)
ARDLQVYGMDV

SEQ ID NO: 4809 - protein, 9 aa, Homo sapiens
  Light chain CDR3 for antibody 2405 (IGKV3-20)
QQYGSSPDT

SEQ ID NO: 4810 - protein, 11 aa, Homo sapiens
  Heavy chain CDR3 for antibody 2405 (IGHV5-51)
ATLDYGGALPY

SEQ ID NO: 4811 - protein, 9 aa, Homo sapiens
  Light chain CDR3 for antibody 2406 (IGKV3-20)
QQYGSSPET

SEQ ID NO: 4812 - protein, 13 aa, Homo sapiens
  Heavy chain CDR3 for antibody 2406 (IGHV1-69)
ARFPNAALRAFDI

SEQ ID NO: 4813 - protein, 9 aa, Homo sapiens
  Light chain CDR3 for antibody 2407 (IGKV1-9)
QQYGSSPLT

SEQ ID NO: 4814 - protein, 11 aa, Homo sapiens
  Heavy chain CDR3 for antibody 2407 (IGHV3-53)
ARDLQVYGMDV

SEQ ID NO: 4815 - protein, 9 aa, Homo sapiens
  Light chain CDR3 for antibody 2408 (IGKV3-20)
QQYGSSPLT

SEQ ID NO: 4816 - protein, 20 aa, Homo sapiens
  Heavy chain CDR3 for antibody 2408 (IGHV4-39)
ARTGHLIRFLEWLPINWFDP

SEQ ID NO: 4817 - protein, 9 aa, Homo sapiens
  Light chain CDR3 for antibody 2409 (IGKV3-20)
QQYGSSPLT

SEQ ID NO: 4818 - protein, 17 aa, Homo sapiens
  Heavy chain CDR3 for antibody 2409 (IGHV4-31)
ASANRHTIFGVVGPFDY

SEQ ID NO: 4819 - protein, 9 aa, Homo sapiens
  Light chain CDR3 for antibody 2410 (IGKV1-NL1)
QQYYSTPYT

SEQ ID NO: 4820 - protein, 12 aa, Homo sapiens
  Heavy chain CDR3 for antibody 2410 (IGHV1-2)
ARMGGRGDYIDY

SEQ ID NO: 4821 - protein, 8 aa, Homo sapiens
  Light chain CDR3 for antibody 2411 (IGKV3-11)
QQRIYWWT

SEQ ID NO: 4822 - protein, 17 aa, Homo sapiens
  Heavy chain CDR3 for antibody 2411 (IGHV3-66)
AREDWNDRDVRYDWFDP

SEQ ID NO: 4823 - protein, 9 aa, Homo sapiens
  Light chain CDR3 for antibody 2412 (IGKV1-33)
QQYDNLPLT

SEQ ID NO: 4824 - protein, 18 aa, Homo sapiens
  Heavy chain CDR3 for antibody 2412 (IGHV1-69)
ARGAGIVGAIGRHSFFNY

SEQ ID NO: 4825 - protein, 9 aa, Homo sapiens
  Light chain CDR3 for antibody 2413 (IGKV1-39)
QQTNSLPRT

SEQ ID NO: 4826 - protein, 20 aa, Homo sapiens
  Heavy chain CDR3 for antibody 2413 (IGHV4-34)
ARGIPGGISPTGAPLSWLDP

SEQ ID NO: 4827 - protein, 9 aa, Homo sapiens
  Light chain CDR3 for antibody 2414 (IGKV3-20)
QKYGSSPWT

SEQ ID NO: 4828 - protein, 13 aa, Homo sapiens
  Heavy chain CDR3 for antibody 2414 (IGHV5-51)
VMSGYLSDWSAPY

SEQ ID NO: 4829 - protein, 8 aa, Homo sapiens
  Light chain CDR3 for antibody 2415 (IGKV1-33)
QQYDNLPS

SEQ ID NO: 4830 - protein, 13 aa, Homo sapiens
  Heavy chain CDR3 for antibody 2415 (IGHV4-31)
ARDYGGNSAQFGY

SEQ ID NO: 4831 - protein, 9 aa, Homo sapiens
  Light chain CDR3 for antibody 2416 (IGKV3-20)
QQYGSSLYT

SEQ ID NO: 4832 - protein, 9 aa, Homo sapiens
  Heavy chain CDR3 for antibody 2416 (IGHV3-53)
ARESYGMDV

SEQ ID NO: 4833 - protein, 8 aa, Homo sapiens
  Light chain CDR3 for antibody 2417 (IGKV1-33)
QQYDNLPS

SEQ ID NO: 4834 - protein, 9 aa, Homo sapiens
  Heavy chain CDR3 for antibody 2417 (IGHV3-53)
ARESYGMDV

SEQ ID NO: 4835 - protein, 10 aa, Homo sapiens
  Light chain CDR3 for antibody 2418 (IGKV3-11)
QQRSTWPPYT

SEQ ID NO: 4836 - protein, 11 aa, Homo sapiens
  Heavy chain CDR3 for antibody 2418 (IGHV1-2)
VKGRRGYSAEY

SEQ ID NO: 4837 - protein, 8 aa, Homo sapiens
  Light chain CDR3 for antibody 2419 (IGKV1-33)
QQYDNLPS

SEQ ID NO: 4838 - protein, 11 aa, Homo sapiens
  Heavy chain CDR3 for antibody 2419 (IGHV3-53)
ARDLQVYGMDV

SEQ ID NO: 4839 - protein, 9 aa, Homo sapiens
  Light chain CDR3 for antibody 2420 (IGKV3-20)
QQYGSSLYT

SEQ ID NO: 4840 - protein, 13 aa, Homo sapiens
  Heavy chain CDR3 for antibody 2420 (IGHV4-31)
ARDYGGNSAQFGY

SEQ ID NO: 4841 - protein, 9 aa, Homo sapiens
  Light chain CDR3 for antibody 2421 (IGKV1-9)
QQLNSYSYT

SEQ ID NO: 4842 - protein, 14 aa, Homo sapiens
  Heavy chain CDR3 for antibody 2421 (IGHV3-23)
AKALAAAGYDAFDI

SEQ ID NO: 4843 - protein, 9 aa, Homo sapiens
  Light chain CDR3 for antibody 2422 (IGKV3-20)
QQYGSSLYT

SEQ ID NO: 4844 - protein, 19 aa, Homo sapiens
  Heavy chain CDR3 for antibody 2422 (IGHV1-69)
ARAHRSSTSYRLGINWFDP

SEQ ID NO: 4845 - protein, 9 aa, Homo sapiens
  Light chain CDR3 for antibody 2423 (IGKV1-39)
QQSYSTPPT

SEQ ID NO: 4846 - protein, 16 aa, Homo sapiens
  Heavy chain CDR3 for antibody 2423 (IGHV1-18)
ARANPGAVGYYYGMDV

SEQ ID NO: 4847 - protein, 12 aa, Homo sapiens
  Light chain CDR3 for antibody 2424 (IGKV3-11)
QQRSIWPPKPLT

SEQ ID NO: 4848 - protein, 11 aa, Homo sapiens
  Heavy chain CDR3 for antibody 2424 (IGHV4-59)
ARLYGIESRDY

SEQ ID NO: 4849 - protein, 9 aa, Homo sapiens
  Light chain CDR3 for antibody 2425 (IGKV1-39)
QQSYSTPWT

SEQ ID NO: 4850 - protein, 16 aa, Homo sapiens
  Heavy chain CDR3 for antibody 2425 (IGHV1-69)
AKDRMTAPLHYWYFDL

SEQ ID NO: 4851 - protein, 9 aa, Homo sapiens
  Light chain CDR3 for antibody 2426 (IGKV1-5)
YQYKGSLYT

SEQ ID NO: 4852 - protein, 11 aa, Homo sapiens
  Heavy chain CDR3 for antibody 2426 (IGHV4/OR15-8)
ASRRITVCFDS

SEQ ID NO: 4853 - protein, 7 aa, Homo sapiens
  Light chain CDR3 for antibody 2427 (IGKV1-9)
QQLVEFT

SEQ ID NO: 4854 - protein, 11 aa, Homo sapiens
  Heavy chain CDR3 for antibody 2427 (IGHV1-46)
AGADLLGGSNH

SEQ ID NO: 4855 - protein, 9 aa, Homo sapiens
  Light chain CDR3 for antibody 2428 (IGKV1-9)
QQLNSYPQT

SEQ ID NO: 4856 - protein, 18 aa, Homo sapiens
  Heavy chain CDR3 for antibody 2428 (IGHV1-69)
ARGAGIVGAIGRHSFFNY

SEQ ID NO: 4857 - protein, 9 aa, Homo sapiens
  Light chain CDR3 for antibody 2429 (IGKV1-33)
QQYDNLPPT

SEQ ID NO: 4858 - protein, 16 aa, Homo sapiens
  Heavy chain CDR3 for antibody 2429 (IGHV5-51)
ARPFTSGSSGWYAIDY

SEQ ID NO: 4859 - protein, 9 aa, Homo sapiens
  Light chain CDR3 for antibody 2430 (IGKV3-20)
QQYGSSPLT

SEQ ID NO: 4860 - protein, 9 aa, Homo sapiens
  Heavy chain CDR3 for antibody 2430 (IGHV5-51)
AILIELADY

SEQ ID NO: 4861 - protein, 10 aa, Homo sapiens
  Light chain CDR3 for antibody 2431 (IGKV3-15)
QQYNNWPPLT

SEQ ID NO: 4862 - protein, 15 aa, Homo sapiens
  Heavy chain CDR3 for antibody 2431 (IGHV1-69)
ATDRVGTPRPSRFDY

SEQ ID NO: 4863 - protein, 9 aa, Homo sapiens
  Light chain CDR3 for antibody 2432 (IGKV1-33)
QQYDNLPLT

SEQ ID NO: 4864 - protein, 7 aa, Homo sapiens
  Heavy chain CDR3 for antibody 2432 (IGHV4-4)
ARGGTDV

SEQ ID NO: 4865 - protein, 9 aa, Homo sapiens
  Light chain CDR3 for antibody 2433 (IGKV1-9)
QQLNSYPPP

SEQ ID NO: 4866 - protein, 19 aa, Homo sapiens
  Heavy chain CDR3 for antibody 2433 (IGHV1-69)
ARAHRSSTSYRLGINWFDP

SEQ ID NO: 4867 - protein, 10 aa, Homo sapiens
  Light chain CDR3 for antibody 2434 (IGKV3-11)
QQRDNWPPIT

SEQ ID NO: 4868 - protein, 16 aa, Homo sapiens
  Heavy chain CDR3 for antibody 2434 (IGHV3-33)
VRDSGVAGRRGNYFDP

SEQ ID NO: 4869 - protein, 9 aa, Homo sapiens
  Light chain CDR3 for antibody 2435 (IGKV1-39)
QQSYSTPPT

SEQ ID NO: 4870 - protein, 11 aa, Homo sapiens
  Heavy chain CDR3 for antibody 2435 (IGHV3-53)
ARDGRGDLWSY

SEQ ID NO: 4871 - protein, 9 aa, Homo sapiens
  Light chain CDR3 for antibody 2436 (IGKV1-9)
QQLNSYPQT

SEQ ID NO: 4872 - protein, 9 aa, Homo sapiens
  Heavy chain CDR3 for antibody 2436 (IGHV3-53)
ARESYGMDV

SEQ ID NO: 4873 - protein, 9 aa, Homo sapiens
  Light chain CDR3 for antibody 2437 (IGKV1-NL1)
QQYYSTPWT

SEQ ID NO: 4874 - protein, 13 aa, Homo sapiens
  Heavy chain CDR3 for antibody 2437 (IGHV3-9)
AKGYGFTTYYMDV

SEQ ID NO: 4875 - protein, 9 aa, Homo sapiens
  Light chain CDR3 for antibody 2438 (IGKV3-20)
QQYGSSPWT

SEQ ID NO: 4876 - protein, 6 aa, Homo sapiens
  Heavy chain CDR3 for antibody 2438 (IGHV4-59)
AREFDY

SEQ ID NO: 4877 - protein, 6 aa, Homo sapiens
  Light chain CDR3 for antibody 2439 (IGKV3-20)
QQYGST

SEQ ID NO: 4878 - protein, 16 aa, Homo sapiens
  Heavy chain CDR3 for antibody 2439 (IGHV5-a)
ARHWSPVVVRGSEPDY

SEQ ID NO: 4879 - protein, 11 aa, Homo sapiens
  Light chain CDR3 for antibody 2440 (IGKV3-15)
QQYNNWPPMYT

SEQ ID NO: 4880 - protein, 12 aa, Homo sapiens
  Heavy chain CDR3 for antibody 2440 (IGHV3-53)
ARDLGSVGATDY

SEQ ID NO: 4881 - protein, 8 aa, Homo sapiens
  Light chain CDR3 for antibody 2441 (IGKV3-11)
QQRSNWPS

SEQ ID NO: 4882 - protein, 21 aa, Homo sapiens
  Heavy chain CDR3 for antibody 2441 (IGHV3-11)
AREFFYDSSGYYSYYYYGMDV

SEQ ID NO: 4883 - protein, 9 aa, Homo sapiens
  Light chain CDR3 for antibody 2442 (IGKV1-16)
QQYNSYPFT

SEQ ID NO: 4884 - protein, 15 aa, Homo sapiens
  Heavy chain CDR3 for antibody 2442 (IGHV1-46)
LRGGHHSGLGSPWGY

SEQ ID NO: 4885 - protein, 10 aa, Homo sapiens
  Light chain CDR3 for antibody 2443 (IGKV3-20)
QQYDDSPPWT

SEQ ID NO: 4886 - protein, 14 aa, Homo sapiens
  Heavy chain CDR3 for antibody 2443 (IGHV6-1)
ARGQHGNYVALFDP

SEQ ID NO: 4887 - protein, 9 aa, Homo sapiens
  Light chain CDR3 for antibody 2444 (IGKV3-20)
QQYGSSPRT

SEQ ID NO: 4888 - protein, 20 aa, Homo sapiens
  Heavy chain CDR3 for antibody 2444 (IGHV4-59)
ARDGDSYDFWSGYGGYGMDV

SEQ ID NO: 4889 - protein, 9 aa, Homo sapiens
  Light chain CDR3 for antibody 2445 (IGKV1-12)
QQAHSIPLT

SEQ ID NO: 4890 - protein, 13 aa, Homo sapiens
  Heavy chain CDR3 for antibody 2445 (IGHV3-23)
AKHRVSATDGFDI

SEQ ID NO: 4891 - protein, 9 aa, Homo sapiens
  Light chain CDR3 for antibody 2446 (IGKV1-39)
QQSYSTLLT

SEQ ID NO: 4892 - protein, 19 aa, Homo sapiens
  Heavy chain CDR3 for antibody 2446 (IGHV4/OR15-8)
ARDALGYCSGGRCYAAFDI

SEQ ID NO: 4893 - protein, 9 aa, Homo sapiens
  Light chain CDR3 for antibody 2447 (IGKV3-20)
QQYGSSPLT

SEQ ID NO: 4894 - protein, 13 aa, Homo sapiens
  Heavy chain CDR3 for antibody 2447 (IGHV1-69)
ARSVVGSGSNFDY

SEQ ID NO: 4895 - protein, 9 aa, Homo sapiens
  Light chain CDR3 for antibody 2448 (IGKV1-39)
QQSFTFPFT

SEQ ID NO: 4896 - protein, 16 aa, Homo sapiens
  Heavy chain CDR3 for antibody 2448 (IGHV1-8)
AGEPLGAPAAVNRFDS

SEQ ID NO: 4897 - protein, 9 aa, Homo sapiens
  Light chain CDR3 for antibody 2449 (IGKV1-39)
QQSYSTPPT

SEQ ID NO: 4898 - protein, 19 aa, Homo sapiens
  Heavy chain CDR3 for antibody 2449 (IGHV1-69)
ARARGSSASYRLGINWFDA

SEQ ID NO: 4899 - protein, 9 aa, Homo sapiens
  Light chain CDR3 for antibody 2450 (IGKV1-9)
QQLNSYSYT

SEQ ID NO: 4900 - protein, 16 aa, Homo sapiens
  Heavy chain CDR3 for antibody 2450 (IGHV3-23)
AKDRMTAPLHYWYFDL

SEQ ID NO: 4901 - protein, 9 aa, Homo sapiens
  Light chain CDR3 for antibody 2451 (IGKV1-33)
QQYDNLPLT

SEQ ID NO: 4902 - protein, 16 aa, Homo sapiens
  Heavy chain CDR3 for antibody 2451 (IGHV1-18)
ARANPGAVGYYYGMDV

SEQ ID NO: 4903 - protein, 9 aa, Homo sapiens
  Light chain CDR3 for antibody 2452 (IGKV1-9)
QQLTSYSYT

SEQ ID NO: 4904 - protein, 13 aa, Homo sapiens
  Heavy chain CDR3 for antibody 2452 (IGHV4-31)
ARDYGGNSAQFGY

SEQ ID NO: 4905 - protein, 8 aa, Homo sapiens
  Light chain CDR3 for antibody 2453 (IGKV3-20)
QQYGTSLP

SEQ ID NO: 4906 - protein, 17 aa, Homo sapiens
  Heavy chain CDR3 for antibody 2453 (IGHV1-69)
ARWAGTPTSRWSGPADY

SEQ ID NO: 4907 - protein, 10 aa, Homo sapiens
  Light chain CDR3 for antibody 2454 (IGKV1-33)
QQYDNLPMYT

SEQ ID NO: 4908 - protein, 21 aa, Homo sapiens
  Heavy chain CDR3 for antibody 2454 (IGHV4-31)
ARDGGEFLEWLSSRGPGWFDP

SEQ ID NO: 4909 - protein, 10 aa, Homo sapiens
  Light chain CDR3 for antibody 2455 (IGKV1-39)
QQSYDTPEWT

SEQ ID NO: 4910 - protein, 14 aa, Homo sapiens
  Heavy chain CDR3 for antibody 2455 (IGHV5-51)
VRQVVRGVEGRFDP

SEQ ID NO: 4911 - protein, 9 aa, Homo sapiens
  Light chain CDR3 for antibody 2456 (IGKV1-39)
QQSYSTLGT

SEQ ID NO: 4912 - protein, 13 aa, Homo sapiens
  Heavy chain CDR3 for antibody 2456 (IGHV4-34)
AREWVRYYYYMDV

SEQ ID NO: 4913 - protein, 10 aa, Homo sapiens
  Light chain CDR3 for antibody 2457 (IGKV3-11)
QQRSNWPPLT

SEQ ID NO: 4914 - protein, 14 aa, Homo sapiens
  Heavy chain CDR3 for antibody 2457 (IGHV1-8)
ARGFGGWGNYYMDV

SEQ ID NO: 4915 - protein, 9 aa, Homo sapiens
  Light chain CDR3 for antibody 2458 (IGKV1-12)
QQANGFPLT

SEQ ID NO: 4916 - protein, 12 aa, Homo sapiens
  Heavy chain CDR3 for antibody 2458 (IGHV2-5)
GYRGGARAWFGP

SEQ ID NO: 4917 - protein, 9 aa, Homo sapiens
  Light chain CDR3 for antibody 2459 (IGKV1-16)
QQYNSYPLT

SEQ ID NO: 4918 - protein, 13 aa, Homo sapiens
  Heavy chain CDR3 for antibody 2459 (IGHV1-24)
ATTPVPRYFDWFV

SEQ ID NO: 4919 - protein, 9 aa, Homo sapiens
  Light chain CDR3 for antibody 2460 (IGKV3-20)
QQYGSSPVT

SEQ ID NO: 4920 - protein, 13 aa, Homo sapiens
  Heavy chain CDR3 for antibody 2460 (IGHV1-69)
ASVVLGRLDGYAY

SEQ ID NO: 4921 - protein, 9 aa, Homo sapiens
  Light chain CDR3 for antibody 2461 (IGKV1-12)
QQANSFPPT

SEQ ID NO: 4922 - protein, 11 aa, Homo sapiens
  Heavy chain CDR3 for antibody 2461 (IGHV3-53)
ARDLQVYGMDV

SEQ ID NO: 4923 - protein, 9 aa, Homo sapiens
  Light chain CDR3 for antibody 2462 (IGKV2D-28)
MQALQTPLT

SEQ ID NO: 4924 - protein, 16 aa, Homo sapiens
  Heavy chain CDR3 for antibody 2462 (IGHV4/OR15-8)
ARYATAPIKQYNWFDP

SEQ ID NO: 4925 - protein, 9 aa, Homo sapiens
  Light chain CDR3 for antibody 2463 (IGKV3-20)
QQYGSSLYT

SEQ ID NO: 4926 - protein, 18 aa, Homo sapiens
  Heavy chain CDR3 for antibody 2463 (IGHV4-34)
ARGAYSSSWYGVRSWFDP

SEQ ID NO: 4927 - protein, 9 aa, Homo sapiens
  Light chain CDR3 for antibody 2464 (IGKV3-20)
QQYGSSPLA

SEQ ID NO: 4928 - protein, 18 aa, Homo sapiens
  Heavy chain CDR3 for antibody 2464 (IGHV4-34)
ARGGNTIFGVVIIGAFDY

SEQ ID NO: 4929 - protein, 9 aa, Homo sapiens
  Light chain CDR3 for antibody 2465 (IGKV1-33)
QQYDNLPIT

SEQ ID NO: 4930 - protein, 11 aa, Homo sapiens
  Heavy chain CDR3 for antibody 2465 (IGHV3-53)
ARDLGPYGMDV

SEQ ID NO: 4931 - protein, 9 aa, Homo sapiens
  Light chain CDR3 for antibody 2466 (IGKV1-9)
QQLNSYSYT

SEQ ID NO: 4932 - protein, 11 aa, Homo sapiens
  Heavy chain CDR3 for antibody 2466 (IGHV3-53)
ARDGRGDLWAY

SEQ ID NO: 4933 - protein, 10 aa, Homo sapiens
  Light chain CDR3 for antibody 2467 (IGKV4-1)
QQYYSTSTWT

SEQ ID NO: 4934 - protein, 12 aa, Homo sapiens
  Heavy chain CDR3 for antibody 2467 (IGHV1-18)
AKTTPLVTTLGY

SEQ ID NO: 4935 - protein, 8 aa, Homo sapiens
  Light chain CDR3 for antibody 2468 (IGKV3-11)
QQRSNWLT

SEQ ID NO: 4936 - protein, 16 aa, Homo sapiens
  Heavy chain CDR3 for antibody 2468 (IGHV4-31)
ARASRGIFGVVEWSDP

SEQ ID NO: 4937 - protein, 9 aa, Homo sapiens
  Light chain CDR3 for antibody 2469 (IGKV1-9)
QQLNSYPQT

SEQ ID NO: 4938 - protein, 19 aa, Homo sapiens
  Heavy chain CDR3 for antibody 2469 (IGHV1-69)
ARAHRSSTSYRLGINWFDP

SEQ ID NO: 4939 - protein, 9 aa, Homo sapiens
  Light chain CDR3 for antibody 2470 (IGKV1-9)
QQLNSYPQT

SEQ ID NO: 4940 - protein, 16 aa, Homo sapiens
  Heavy chain CDR3 for antibody 2470 (IGHV1-18)
ARANPGAVGYYYGMDV

SEQ ID NO: 4941 - protein, 9 aa, Homo sapiens
  Light chain CDR3 for antibody 2471 (IGKV1-9)
QQLNSYPPP

SEQ ID NO: 4942 - protein, 11 aa, Homo sapiens
  Heavy chain CDR3 for antibody 2471 (IGHV3-53)
ARDIQVYGMDV

SEQ ID NO: 4943 - protein, 9 aa, Homo sapiens
  Light chain CDR3 for antibody 2472 (IGKV1D-16)
LQHYTFPYT

SEQ ID NO: 4944 - protein, 16 aa, Homo sapiens
  Heavy chain CDR3 for antibody 2472 (IGHV3-48)
ATDRPGFCGDGSCWET

SEQ ID NO: 4945 - protein, 10 aa, Homo sapiens
  Light chain CDR3 for antibody 2473 (IGKV2-30)
MQGTHWLPWT

SEQ ID NO: 4946 - protein, 16 aa, Homo sapiens
  Heavy chain CDR3 for antibody 2473 (IGHV1-8)
ARGGRYYDFWSGYSVY

SEQ ID NO: 4947 - protein, 9 aa, Homo sapiens
  Light chain CDR3 for antibody 2474 (IGKV3-11)
QQRRNWPLT

SEQ ID NO: 4948 - protein, 11 aa, Homo sapiens
  Heavy chain CDR3 for antibody 2474 (IGHV3-53)
ARDLQVYGMDV

SEQ ID NO: 4949 - protein, 9 aa, Homo sapiens
  Light chain CDR3 for antibody 2475 (IGKV2-30)
MQGTHWPET

SEQ ID NO: 4950 - protein, 7 aa, Homo sapiens
  Heavy chain CDR3 for antibody 2475 (IGHV1-69)
ASGGGGY

SEQ ID NO: 4951 - protein, 9 aa, Homo sapiens
  Light chain CDR3 for antibody 2476 (IGKV3-11)
QQRRNWPLT

SEQ ID NO: 4952 - protein, 13 aa, Homo sapiens
  Heavy chain CDR3 for antibody 2476 (IGHV4-31)
ARDYGGNSAQFGY

SEQ ID NO: 4953 - protein, 11 aa, Homo sapiens
  Light chain CDR3 for antibody 2477 (IGKV3-15)
QQYNNWPPMYT

SEQ ID NO: 4954 - protein, 9 aa, Homo sapiens
  Heavy chain CDR3 for antibody 2477 (IGHV4-39)
AEIVGATDY

SEQ ID NO: 4955 - protein, 9 aa, Homo sapiens
  Light chain CDR3 for antibody 2478 (IGKV1-33)
QQYDNLPLT

SEQ ID NO: 4956 - protein, 21 aa, Homo sapiens
  Heavy chain CDR3 for antibody 2478 (IGHV1-46)
ARTTVAGSSVTVRRPVYGMDV

SEQ ID NO: 4957 - protein, 8 aa, Homo sapiens
  Light chain CDR3 for antibody 2479 (IGKV1-33)
QQYDNLPS

SEQ ID NO: 4958 - protein, 16 aa, Homo sapiens
  Heavy chain CDR3 for antibody 2479 (IGHV1-18)
ARANPGAVGYYYGMDV

SEQ ID NO: 4959 - protein, 10 aa, Homo sapiens
  Light chain CDR3 for antibody 2480 (IGKV3-20)
QQYGSSPIFT

SEQ ID NO: 4960 - protein, 14 aa, Homo sapiens
  Heavy chain CDR3 for antibody 2480 (IGHV3-33)
ARDGGYSGYAYFDY

SEQ ID NO: 4961 - protein, 9 aa, Homo sapiens
  Light chain CDR3 for antibody 2481 (IGKV1-9)
QQLNSYPPP

SEQ ID NO: 4962 - protein, 11 aa, Homo sapiens
  Heavy chain CDR3 for antibody 2481 (IGHV3-53)
ARGVGTYGMDV

SEQ ID NO: 4963 - protein, 9 aa, Homo sapiens
  Light chain CDR3 for antibody 2482 (IGKV3-20)
QQYGSSPLT

SEQ ID NO: 4964 - protein, 17 aa, Homo sapiens
  Heavy chain CDR3 for antibody 2482 (IGHV4-31)
ARGRIGTIFGVVGPFDY

SEQ ID NO: 4965 - protein, 9 aa, Homo sapiens
  Light chain CDR3 for antibody 2483 (IGKV1-33)
QQYDNLLLT

SEQ ID NO: 4966 - protein, 15 aa, Homo sapiens
  Heavy chain CDR3 for antibody 2483 (IGHV5-51)
ARLYGVVTAIEYFQH

SEQ ID NO: 4967 - protein, 10 aa, Homo sapiens
  Light chain CDR3 for antibody 2484 (IGKV1-39)
QQSYSTLRGT

SEQ ID NO: 4968 - protein, 19 aa, Homo sapiens
  Heavy chain CDR3 for antibody 2484 (IGHV1-24)
ATDRGGVPLGLGFGAIFDY

SEQ ID NO: 4969 - protein, 11 aa, Homo sapiens
  Light chain CDR3 for antibody 2485 (IGKV3-20)
QQYGSSPPLRT

SEQ ID NO: 4970 - protein, 23 aa, Homo sapiens
  Heavy chain CDR3 for antibody 2485 (IGHV1-18)
ARERDDFWSGYPLTYYYYYGMDV

SEQ ID NO: 4971 - protein, 8 aa, Homo sapiens
  Light chain CDR3 for antibody 2486 (IGKV1-33)
QQYDNLPL

SEQ ID NO: 4972 - protein, 14 aa, Homo sapiens
  Heavy chain CDR3 for antibody 2486 (IGHV1-8)
ATWWSYSDRKPFDY

SEQ ID NO: 4973 - protein, 9 aa, Homo sapiens
  Light chain CDR3 for antibody 2487 (IGKV3-20)
QQYGSSPLT

SEQ ID NO: 4974 - protein, 16 aa, Homo sapiens
  Heavy chain CDR3 for antibody 2487 (IGHV4-31)
ARARITMIVVVSHFDY

SEQ ID NO: 4975 - protein, 9 aa, Homo sapiens
  Light chain CDR3 for antibody 2488 (IGKV3-11)
QQRRNWPLT

SEQ ID NO: 4976 - protein, 9 aa, Homo sapiens
  Heavy chain CDR3 for antibody 2488 (IGHV3-53)
ARESYGMDV

SEQ ID NO: 4977 - protein, 9 aa, Homo sapiens
  Light chain CDR3 for antibody 2489 (IGKV1-33)
QQYDNLPPT

SEQ ID NO: 4978 - protein, 13 aa, Homo sapiens
  Heavy chain CDR3 for antibody 2489 (IGHV4-31)
ARDYGGSSAHFDY

SEQ ID NO: 4979 - protein, 8 aa, Homo sapiens
  Light chain CDR3 for antibody 2490 (IGKV1-33)
QQYDNLPS

SEQ ID NO: 4980 - protein, 11 aa, Homo sapiens
  Heavy chain CDR3 for antibody 2490 (IGHV1-69)
ARDGRGDLWSY

SEQ ID NO: 4981 - protein, 9 aa, Homo sapiens
  Light chain CDR3 for antibody 2491 (IGKV3-20)
QQYGSSPYT

SEQ ID NO: 4982 - protein, 14 aa, Homo sapiens
  Heavy chain CDR3 for antibody 2491 (IGHV1-69)
ARARDYYYYYGMDV

SEQ ID NO: 4983 - protein, 9 aa, Homo sapiens
  Light chain CDR3 for antibody 2492 (IGKV3-20)
QQYGSSLYT

SEQ ID NO: 4984 - protein, 11 aa, Homo sapiens
  Heavy chain CDR3 for antibody 2492 (IGHV1-18)
ARDLGPYGMDV

SEQ ID NO: 4985 - protein, 10 aa, Homo sapiens
  Light chain CDR3 for antibody 2493 (IGKV2-30)
VQGTHWPRYT

SEQ ID NO: 4986 - protein, 16 aa, Homo sapiens
  Heavy chain CDR3 for antibody 2493 (IGHV5-51)
ARLRAGGAGGTGDFDS

SEQ ID NO: 4987 - protein, 9 aa, Homo sapiens
  Light chain CDR3 for antibody 2494 (IGKV1-33)
QQYDNLPLT

SEQ ID NO: 4988 - protein, 13 aa, Homo sapiens
  Heavy chain CDR3 for antibody 2494 (IGHV5-51)
ARRYSGFHAELDY

SEQ ID NO: 4989 - protein, 9 aa, Homo sapiens
  Light chain CDR3 for antibody 2495 (IGKV3-11)
QQRRNWPLT

SEQ ID NO: 4990 - protein, 19 aa, Homo sapiens
  Heavy chain CDR3 for antibody 2495 (IGHV1-69)
ARAHRSSTSYRLGINWFDP

SEQ ID NO: 4991 - protein, 8 aa, Homo sapiens
  Light chain CDR3 for antibody 2496 (IGKV3-20)
QQYGSSPP

SEQ ID NO: 4992 - protein, 19 aa, Homo sapiens
  Heavy chain CDR3 for antibody 2496 (IGHV1-69)
ARGGWGTVVTPRGYYYMDV

SEQ ID NO: 4993 - protein, 9 aa, Homo sapiens
  Light chain CDR3 for antibody 2497 (IGKV3-20)
QQYGSSLYT

SEQ ID NO: 4994 - protein, 18 aa, Homo sapiens
  Heavy chain CDR3 for antibody 2497 (IGHV1-69)
ARGAGIVGAIGRHSFFNY

SEQ ID NO: 4995 - protein, 9 aa, Homo sapiens
  Light chain CDR3 for antibody 2498 (IGKV1-9)
QQLNSYPPP

SEQ ID NO: 4996 - protein, 12 aa, Homo sapiens
  Heavy chain CDR3 for antibody 2498 (IGHV3-53)
ARDLGSVGATDY

SEQ ID NO: 4997 - protein, 9 aa, Homo sapiens
  Light chain CDR3 for antibody 2499 (IGKV1-9)
QQLNSYPQT

SEQ ID NO: 4998 - protein, 13 aa, Homo sapiens
  Heavy chain CDR3 for antibody 2499 (IGHV5-51)
ARRYSGFHAELDY

SEQ ID NO: 4999 - protein, 9 aa, Homo sapiens
  Light chain CDR3 for antibody 2500 (IGKV1-39)
QQSYSTPPT

SEQ ID NO: 5000 - protein, 13 aa, Homo sapiens
  Heavy chain CDR3 for antibody 2500 (IGHV5-51)
ARRYSGFHAELDY

SEQ ID NO: 5001 - protein, 9 aa, Homo sapiens
  Light chain CDR3 for antibody 2501 (IGKV3-20)
QQYGSSPRT

SEQ ID NO: 5002 - protein, 19 aa, Homo sapiens
  Heavy chain CDR3 for antibody 2501 (IGHV4-59)
ARDRHYTIFGVVIEHYFDY

SEQ ID NO: 5003 - protein, 9 aa, Homo sapiens
  Light chain CDR3 for antibody 2502 (IGKV1-39)
QQSYSTPPT

SEQ ID NO: 5004 - protein, 19 aa, Homo sapiens
  Heavy chain CDR3 for antibody 2502 (IGHV1-46)
ARAARNSTSYRLGINWFDH

SEQ ID NO: 5005 - protein, 9 aa, Homo sapiens
  Light chain CDR3 for antibody 2503 (IGKV3-20)
QQYGSSPYT

SEQ ID NO: 5006 - protein, 11 aa, Homo sapiens
  Heavy chain CDR3 for antibody 2503 (IGHV3-53)
ARDGRGDLWSY

SEQ ID NO: 5007 - protein, 8 aa, Homo sapiens
  Light chain CDR3 for antibody 2504 (IGKV1-5)
QQYRSYWT

SEQ ID NO: 5008 - protein, 17 aa, Homo sapiens
  Heavy chain CDR3 for antibody 2504 (IGHV3-66)
VKDGGTIYDVVNAPLDD

SEQ ID NO: 5009 - protein, 9 aa, Homo sapiens
  Light chain CDR3 for antibody 2505 (IGKV1-9)
QQLNSYPQT

SEQ ID NO: 5010 - protein, 11 aa, Homo sapiens
  Heavy chain CDR3 for antibody 2505 (IGHV3-53)
ARDLHMYCMDV

SEQ ID NO: 5011 - protein, 9 aa, Homo sapiens
  Light chain CDR3 for antibody 2506 (IGKV1-9)
QQLNSYPQT

SEQ ID NO: 5012 - protein, 11 aa, Homo sapiens
  Heavy chain CDR3 for antibody 2506 (IGHV3-66)
TIDLQMYCMDV

SEQ ID NO: 5013 - protein, 9 aa, Homo sapiens
  Light chain CDR3 for antibody 2507 (IGKV1-33)
QQYDNLPLT

SEQ ID NO: 5014 - protein, 13 aa, Homo sapiens
  Heavy chain CDR3 for antibody 2507 (IGHV4-34)
AREWVRYYYYMDV

SEQ ID NO: 5015 - protein, 9 aa, Homo sapiens
  Light chain CDR3 for antibody 2508 (IGKV1-9)
QQLNSYPYT

SEQ ID NO: 5016 - protein, 12 aa, Homo sapiens
  Heavy chain CDR3 for antibody 2508 (IGHV1-2)
ARMGGRGDYIDY

SEQ ID NO: 5017 - protein, 9 aa, Homo sapiens
  Light chain CDR3 for antibody 2509 (IGKV1-9)
QQLNSYPQT

SEQ ID NO: 5018 - protein, 17 aa, Homo sapiens
  Heavy chain CDR3 for antibody 2509 (IGHV3-66)
AREDWNDRDVRYDWFDP

SEQ ID NO: 5019 - protein, 8 aa, Homo sapiens
  Light chain CDR3 for antibody 2510 (IGKV3-11)
QQRSNWPS

SEQ ID NO: 5020 - protein, 11 aa, Homo sapiens
  Heavy chain CDR3 for antibody 2510 (IGHV1-69)
ARDLQPYGMDV

SEQ ID NO: 5021 - protein, 10 aa, Homo sapiens
  Light chain CDR3 for antibody 2511 (IGKV3-20)
QQYGSSPSWT

SEQ ID NO: 5022 - protein, 26 aa, Homo sapiens
  Heavy chain CDR3 for antibody 2511 (IGHV4-b)
ASATPHYYDSSGYYYEAFHYYYYMDV

SEQ ID NO: 5023 - protein, 9 aa, Homo sapiens
  Light chain CDR3 for antibody 2512 (IGKV1-39)
QQSYSTPPT

SEQ ID NO: 5024 - protein, 19 aa, Homo sapiens
  Heavy chain CDR3 for antibody 2512 (IGHV1-69)
ARADRGSTSYRLGISWFDP

SEQ ID NO: 5025 - protein, 9 aa, Homo sapiens
  Light chain CDR3 for antibody 2513 (IGKV1-39)
QQSYSTPPT

SEQ ID NO: 5026 - protein, 14 aa, Homo sapiens
  Heavy chain CDR3 for antibody 2513 (IGHV3-23)
AKALAAAGYDAFDI

SEQ ID NO: 5027 - protein, 9 aa, Homo sapiens
  Light chain CDR3 for antibody 2514 (IGKV1-9)
QQLNSYPQT

SEQ ID NO: 5028 - protein, 11 aa, Homo sapiens
  Heavy chain CDR3 for antibody 2514 (IGHV3-53)
ARDLHIYYLDV

SEQ ID NO: 5029 - protein, 9 aa, Homo sapiens
  Light chain CDR3 for antibody 2515 (IGKV1-9)
QQLNSYPQT

SEQ ID NO: 5030 - protein, 11 aa, Homo sapiens
  Heavy chain CDR3 for antibody 2515 (IGHV3-53)
ARDRGPYGMDV

SEQ ID NO: 5031 - protein, 9 aa, Homo sapiens
  Light chain CDR3 for antibody 2516 (IGKV1-12)
QQANSFPYT

SEQ ID NO: 5032 - protein, 15 aa, Homo sapiens
  Heavy chain CDR3 for antibody 2516 (IGHV1-69)
ARDWTDSTVTGYFDL

SEQ ID NO: 5033 - protein, 9 aa, Homo sapiens
  Light chain CDR3 for antibody 2517 (IGKV1-9)
QQLNSYPQT

SEQ ID NO: 5034 - protein, 19 aa, Homo sapiens
  Heavy chain CDR3 for antibody 2517 (IGHV3-53)
ARADRSSTSYRLGINWLDP

SEQ ID NO: 5035 - protein, 9 aa, Homo sapiens
  Light chain CDR3 for antibody 2518 (IGKV1-5)
QQYSSYPRT

SEQ ID NO: 5036 - protein, 11 aa, Homo sapiens
  Heavy chain CDR3 for antibody 2518 (IGHV3-21)
ARTYALGSFEY

SEQ ID NO: 5037 - protein, 9 aa, Homo sapiens
  Light chain CDR3 for antibody 2519 (IGKV1-9)
QQLNSYPPP

SEQ ID NO: 5038 - protein, 16 aa, Homo sapiens
  Heavy chain CDR3 for antibody 2519 (IGHV1-18)
ARANPEAVGYYYGMDV

SEQ ID NO: 5039 - protein, 11 aa, Homo sapiens
  Light chain CDR3 for antibody 2520 (IGKV3-11)
QQTNGWPPTIA

SEQ ID NO: 5040 - protein, 15 aa, Homo sapiens
  Heavy chain CDR3 for antibody 2520 (IGHV1-46)
ARLPNIALAATGFDS

SEQ ID NO: 5041 - protein, 9 aa, Homo sapiens
  Light chain CDR3 for antibody 2521 (IGKV2-30)
MKGTHWPPD

SEQ ID NO: 5042 - protein, 15 aa, Homo sapiens
  Heavy chain CDR3 for antibody 2521 (IGHV1-69)
ATDRVGTPRPSRFDY

SEQ ID NO: 5043 - protein, 9 aa, Homo sapiens
  Light chain CDR3 for antibody 2522 (IGKV1-12)
QQADSFPWP

SEQ ID NO: 5044 - protein, 16 aa, Homo sapiens
  Heavy chain CDR3 for antibody 2522 (IGHV3-23)
AKPRQVMAAHFDGFDY

SEQ ID NO: 5045 - protein, 8 aa, Homo sapiens
  Light chain CDR3 for antibody 2523 (IGKV1-5)
QKYNSYWT

SEQ ID NO: 5046 - protein, 18 aa, Homo sapiens
  Heavy chain CDR3 for antibody 2523 (IGHV3-53)
ARGMNDFWSGSEFSGMDV

SEQ ID NO: 5047 - protein, 9 aa, Homo sapiens
  Light chain CDR3 for antibody 2524 (IGKV1-33)
QQYDNLPLT

SEQ ID NO: 5048 - protein, 11 aa, Homo sapiens
  Heavy chain CDR3 for antibody 2524 (IGHV4/OR15-8)
ASRRITGCFDS

SEQ ID NO: 5049 - protein, 9 aa, Homo sapiens
  Light chain CDR3 for antibody 2525 (IGKV1-39)
QQSYSTPPT

SEQ ID NO: 5050 - protein, 19 aa, Homo sapiens
  Heavy chain CDR3 for antibody 2525 (IGHV1-69)
ARANRSSTSYRLGINCCDH

SEQ ID NO: 5051 - protein, 9 aa, Homo sapiens
  Light chain CDR3 for antibody 2526 (IGKV2D-28)
MQGLEAPWT

SEQ ID NO: 5052 - protein, 16 aa, Homo sapiens
  Heavy chain CDR3 for antibody 2526 (IGHV3-74)
ARGQRDPNYHYHGADV

SEQ ID NO: 5053 - protein, 9 aa, Homo sapiens
  Light chain CDR3 for antibody 2527 (IGKV1D-12)
QQAHSFPYT

SEQ ID NO: 5054 - protein, 20 aa, Homo sapiens
  Heavy chain CDR3 for antibody 2527 (IGHV3-66)
ARRPDFDFWSGTTLAYGMDV

SEQ ID NO: 5055 - protein, 10 aa, Homo sapiens
  Light chain CDR3 for antibody 2528 (IGKV3-11)
QQRSNWPPFT

SEQ ID NO: 5056 - protein, 15 aa, Homo sapiens
  Heavy chain CDR3 for antibody 2528 (IGHV1-69)
AQQGDGYNLDDAFDI

SEQ ID NO: 5057 - protein, 9 aa, Homo sapiens
  Light chain CDR3 for antibody 2529 (IGKV3-20)
QQYGSSLLT

SEQ ID NO: 5058 - protein, 13 aa, Homo sapiens
  Heavy chain CDR3 for antibody 2529 (IGHV1-46)
ARAGTYYYYYMDV

SEQ ID NO: 5059 - protein, 9 aa, Homo sapiens
  Light chain CDR3 for antibody 2530 (IGKV3-20)
QQYGSSLYT

SEQ ID NO: 5060 - protein, 13 aa, Homo sapiens
  Heavy chain CDR3 for antibody 2530 (IGHV5-51)
ARRYSGFHAELDY

SEQ ID NO: 5061 - protein, 9 aa, Homo sapiens
  Light chain CDR3 for antibody 2531 (IGKV1-9)
QQLNSYPQT

SEQ ID NO: 5062 - protein, 11 aa, Homo sapiens
  Heavy chain CDR3 for antibody 2531 (IGHV3-53)
ARDLRVYCLDL

SEQ ID NO: 5063 - protein, 9 aa, Homo sapiens
  Light chain CDR3 for antibody 2532 (IGKV1-5)
QQYNSYPYT

SEQ ID NO: 5064 - protein, 17 aa, Homo sapiens
  Heavy chain CDR3 for antibody 2532 (IGHV4-39)
ASANRHTIFGVVGPFDY

SEQ ID NO: 5065 - protein, 9 aa, Homo sapiens
  Light chain CDR3 for antibody 2533 (IGKV1-33)
QQYDNLPLT

SEQ ID NO: 5066 - protein, 16 aa, Homo sapiens
  Heavy chain CDR3 for antibody 2533 (IGHV1-69)
AKDRMTAPLHYWYFDL

SEQ ID NO: 5067 - protein, 9 aa, Homo sapiens
  Light chain CDR3 for antibody 2534 (IGKV3-11)
QQRRNWPLT

SEQ ID NO: 5068 - protein, 18 aa, Homo sapiens
  Heavy chain CDR3 for antibody 2534 (IGHV3-h)
ARGRAWIQLWHYGVDFDY

SEQ ID NO: 5069 - protein, 8 aa, Homo sapiens
  Light chain CDR3 for antibody 2535 (IGKV1-5)
QQYVTYPT

SEQ ID NO: 5070 - protein, 18 aa, Homo sapiens
  Heavy chain CDR3 for antibody 2535 (IGHV4/OR15-8)
ARVDSAWAGTPRFWYFDL

SEQ ID NO: 5071 - protein, 9 aa, Homo sapiens
  Light chain CDR3 for antibody 2536 (IGKV1-39)
QQSYSTPPT

SEQ ID NO: 5072 - protein, 19 aa, Homo sapiens
  Heavy chain CDR3 for antibody 2536 (IGHV1-69)
ARADRSSPSYRLGINWFDP

SEQ ID NO: 5073 - protein, 9 aa, Homo sapiens
  Light chain CDR3 for antibody 2537 (IGKV1-9)
QQLNSYPQT

SEQ ID NO: 5074 - protein, 11 aa, Homo sapiens
  Heavy chain CDR3 for antibody 2537 (IGHV3-66)
ARDLQKYDIDI

SEQ ID NO: 5075 - protein, 9 aa, Homo sapiens
  Light chain CDR3 for antibody 2538 (IGKV1-39)
QQSYSTPRT

SEQ ID NO: 5076 - protein, 16 aa, Homo sapiens
  Heavy chain CDR3 for antibody 2538 (IGHV3-21)
ARVNWFGEAPRYNSDY

SEQ ID NO: 5077 - protein, 9 aa, Homo sapiens
  Light chain CDR3 for antibody 2539 (IGKV3-20)
QQYGSSPGT

SEQ ID NO: 5078 - protein, 10 aa, Homo sapiens
  Heavy chain CDR3 for antibody 2539 (IGHV3-23)
AKDQGSGWAN

SEQ ID NO: 5079 - protein, 10 aa, Homo sapiens
  Light chain CDR3 for antibody 2540 (IGKV1-33)
QQYDNLPPYT

SEQ ID NO: 5080 - protein, 16 aa, Homo sapiens
  Heavy chain CDR3 for antibody 2540 (IGHV3-30)
AKHGYSYGYWLGYFDY

SEQ ID NO: 5081 - protein, 10 aa, Homo sapiens
  Light chain CDR3 for antibody 2541 (IGKV3-11)
QQRSNWPPYT

SEQ ID NO: 5082 - protein, 13 aa, Homo sapiens
  Heavy chain CDR3 for antibody 2541 (IGHV1-69)
ATLGGDGDYVLDV

SEQ ID NO: 5083 - protein, 9 aa, Homo sapiens
  Light chain CDR3 for antibody 2542 (IGKV1D-17)
LQHNSYPYT

SEQ ID NO: 5084 - protein, 10 aa, Homo sapiens
  Heavy chain CDR3 for antibody 2542 (IGHV3-33)
ARESTDGMDV

SEQ ID NO: 5085 - protein, 9 aa, Homo sapiens
  Light chain CDR3 for antibody 2543 (IGKV1-9)
QQLNSYPFT

SEQ ID NO: 5086 - protein, 17 aa, Homo sapiens
  Heavy chain CDR3 for antibody 2543 (IGHV3-33)
AREITMVRGDNYYGMDV

SEQ ID NO: 5087 - protein, 9 aa, Homo sapiens
  Light chain CDR3 for antibody 2544 (IGKV1-9)
QQLNSYPYT

SEQ ID NO: 5088 - protein, 15 aa, Homo sapiens
  Heavy chain CDR3 for antibody 2544 (IGHV1-46)
AREKYYGSGSYPFDY

SEQ ID NO: 5089 - protein, 9 aa, Homo sapiens
  Light chain CDR3 for antibody 2545 (IGKV6-21)
HQSSSLPYT

SEQ ID NO: 5090 - protein, 16 aa, Homo sapiens
  Heavy chain CDR3 for antibody 2545 (IGHV1-18)
AREGDTMVRGVIAFDY

SEQ ID NO: 5091 - protein, 9 aa, Homo sapiens
  Light chain CDR3 for antibody 2546 (IGKV1-9)
QQLNSHPFT

SEQ ID NO: 5092 - protein, 17 aa, Homo sapiens
  Heavy chain CDR3 for antibody 2546 (IGHV3-33)
AREVTMVRGDNYYGLDV

SEQ ID NO: 5093 - protein, 9 aa, Homo sapiens
  Light chain CDR3 for antibody 2547 (IGKV1D-17)
LQHNSYPYT

SEQ ID NO: 5094 - protein, 17 aa, Homo sapiens
  Heavy chain CDR3 for antibody 2547 (IGHV3-33)
AREITMVRGDNYYGMDV

SEQ ID NO: 5095 - protein, 9 aa, Homo sapiens
  Light chain CDR3 for antibody 2548 (IGKV1-9)
QQLNSYPFT

SEQ ID NO: 5096 - protein, 10 aa, Homo sapiens
  Heavy chain CDR3 for antibody 2548 (IGHV3-33)
ARESTDGMDV

SEQ ID NO: 5097 - protein, 9 aa, Homo sapiens
  Light chain CDR3 for antibody 2549 (IGKV1-9)
QQFNSHPFT

SEQ ID NO: 5098 - protein, 17 aa, Homo sapiens
  Heavy chain CDR3 for antibody 2549 (IGHV3-33)
AREITMLRGDNYYGLDV

SEQ ID NO: 5099 - protein, 9 aa, Homo sapiens
  Light chain CDR3 for antibody 2550 (IGKV1D-17)
LQHNSYPYT

SEQ ID NO: 5100 - protein, 10 aa, Homo sapiens
  Heavy chain CDR3 for antibody 2550 (IGHV3-33)
AREGRTGFDY

SEQ ID NO: 5101 - protein, 9 aa, Homo sapiens
  Light chain CDR3 for antibody 2551 (IGKV1D-17)
LQHNSYPWT

SEQ ID NO: 5102 - protein, 9 aa, Homo sapiens
  Heavy chain CDR3 for antibody 2551 (IGHV3-33)
AREGAGVDY

SEQ ID NO: 5103 - protein, 9 aa, Homo sapiens
  Light chain CDR3 for antibody 2552 (IGKV3D-20)
QQYGSSPWT

SEQ ID NO: 5104 - protein, 19 aa, Homo sapiens
  Heavy chain CDR3 for antibody 2552 (IGHV1-18)
ARDHGYCSSTSCYRAWFDP

SEQ ID NO: 5105 - protein, 9 aa, Homo sapiens
  Light chain CDR3 for antibody 2553 (IGKV1-9)
HQLNSYPYT

SEQ ID NO: 5106 - protein, 15 aa, Homo sapiens
  Heavy chain CDR3 for antibody 2553 (IGHV1-46)
AREKYHGSGSYPFDY

SEQ ID NO: 5107 - protein, 9 aa, Homo sapiens
  Light chain CDR3 for antibody 2554 (IGKV1-9)
QHLNSHPFT

SEQ ID NO: 5108 - protein, 17 aa, Homo sapiens
  Heavy chain CDR3 for antibody 2554 (IGHV3-33)
AREITMVRGDNYYGMDV

SEQ ID NO: 5109 - protein, 9 aa, Homo sapiens
  Light chain CDR3 for antibody 2555 (IGKV1D-17)
LQHNSYPYT

SEQ ID NO: 5110 - protein, 10 aa, Homo sapiens
  Heavy chain CDR3 for antibody 2555 (IGHV3-33)
ARESGEGFDY

SEQ ID NO: 5111 - protein, 9 aa, Homo sapiens
  Light chain CDR3 for antibody 2556 (IGKV1-12)
QQANSFPWT

SEQ ID NO: 5112 - protein, 19 aa, Homo sapiens
  Heavy chain CDR3 for antibody 2556 (IGHV1-18)
ARDHGYCSSTSCYRAWFDP

SEQ ID NO: 5113 - protein, 9 aa, Homo sapiens
  Light chain CDR3 for antibody 2557 (IGKV1D-17)
LQHNSYPYT

SEQ ID NO: 5114 - protein, 12 aa, Homo sapiens
  Heavy chain CDR3 for antibody 2557 (IGHV4-39)
ARQGSYLNWFDP

SEQ ID NO: 5115 - protein, 9 aa, Homo sapiens
  Light chain CDR3 for antibody 2558 (IGKV1-9)
QQLISYPYT

SEQ ID NO: 5116 - protein, 15 aa, Homo sapiens
  Heavy chain CDR3 for antibody 2558 (IGHV1-46)
AREKYYGSGSYPFDS

SEQ ID NO: 5117 - protein, 9 aa, Homo sapiens
  Light chain CDR3 for antibody 2559 (IGKV1D-17)
LQHNSYPYT

SEQ ID NO: 5118 - protein, 15 aa, Homo sapiens
  Heavy chain CDR3 for antibody 2559 (IGHV1-46)
AREKYYGSGSYPFDY

SEQ ID NO: 5119 - protein, 9 aa, Homo sapiens
  Light chain CDR3 for antibody 2560 (IGKV6-21)
HQSSSLPYT

SEQ ID NO: 5120 - protein, 15 aa, Homo sapiens
  Heavy chain CDR3 for antibody 2560 (IGHV1-46)
AREKYYGSGSYPFDY

SEQ ID NO: 5121 - protein, 9 aa, Homo sapiens
  Light chain CDR3 for antibody 2561 (IGKV1-27)
QKYNSAPLT

SEQ ID NO: 5122 - protein, 13 aa, Homo sapiens
  Heavy chain CDR3 for antibody 2561 (IGHV3-33)
ARDWYYGSGSPYY

SEQ ID NO: 5123 - protein, 9 aa, Homo sapiens
  Light chain CDR3 for antibody 2562 (IGKV1D-17)
LQHNSYPYT

SEQ ID NO: 5124 - protein, 16 aa, Homo sapiens
  Heavy chain CDR3 for antibody 2562 (IGHV1-18)
AREGDTMVRGVIAFDY

SEQ ID NO: 5125 - protein, 9 aa, Homo sapiens
  Light chain CDR3 for antibody 2563 (IGKV2D-30)
MQGTHWPPT

SEQ ID NO: 5126 - protein, 8 aa, Homo sapiens
  Heavy chain CDR3 for antibody 2563 (IGHV4-59)
ARDEGMDV

SEQ ID NO: 5127 - protein, 9 aa, Homo sapiens
  Light chain CDR3 for antibody 2564 (IGKV3-15)
QQYNNWPRT

SEQ ID NO: 5128 - protein, 16 aa, Homo sapiens
  Heavy chain CDR3 for antibody 2564 (IGHV3-33)
ARDRDIVATGEYYFDY

SEQ ID NO: 5129 - protein, 9 aa, Homo sapiens
  Light chain CDR3 for antibody 2565 (IGKV1-5)
QQYNSYSRT

SEQ ID NO: 5130 - protein, 17 aa, Homo sapiens
  Heavy chain CDR3 for antibody 2565 (IGHV4-59)
ARTLFWFGELGGWYFDL

SEQ ID NO: 5131 - protein, 9 aa, Homo sapiens
  Light chain CDR3 for antibody 2566 (IGKV1-27)
HQSSSLPYT

SEQ ID NO: 5132 - protein, 13 aa, Homo sapiens
  Heavy chain CDR3 for antibody 2566 (IGHV1-18)
AREGGSFYVSFDY

SEQ ID NO: 5133 - protein, 9 aa, Homo sapiens
  Light chain CDR3 for antibody 2567 (IGKV1-6)
LQDYNYPYT

SEQ ID NO: 5134 - protein, 14 aa, Homo sapiens
  Heavy chain CDR3 for antibody 2567 (IGHV1-8)
ARGPIVRGVIRFDY

SEQ ID NO: 5135 - protein, 9 aa, Homo sapiens
  Light chain CDR3 for antibody 2568 (IGKV3-15)
QQYNNWPLT

SEQ ID NO: 5136 - protein, 9 aa, Homo sapiens
  Heavy chain CDR3 for antibody 2568 (IGHV4-31)
ARDSGYFDY

SEQ ID NO: 5137 - protein, 9 aa, Homo sapiens
  Light chain CDR3 for antibody 2569 (IGKV1-9)
QQFNSYPFT

SEQ ID NO: 5138 - protein, 17 aa, Homo sapiens
  Heavy chain CDR3 for antibody 2569 (IGHV3-33)
AREITLVRGDNYYGMDV

SEQ ID NO: 5139 - protein, 9 aa, Homo sapiens
  Light chain CDR3 for antibody 2570 (IGKV1-8)
QQYYSYPYT

SEQ ID NO: 5140 - protein, 14 aa, Homo sapiens
  Heavy chain CDR3 for antibody 2570 (IGHV3-23)
AKERAVAGLNWFDP

SEQ ID NO: 5141 - protein, 9 aa, Homo sapiens
  Light chain CDR3 for antibody 2571 (IGKV1-9)
QQLNSYPFT

SEQ ID NO: 5142 - protein, 16 aa, Homo sapiens
  Heavy chain CDR3 for antibody 2571 (IGHV1-18)
AREGDTMVRGVIAFDY

SEQ ID NO: 5143 - protein, 9 aa, Homo sapiens
  Light chain CDR3 for antibody 2572 (IGKV1-9)
HQLISYPYT

SEQ ID NO: 5144 - protein, 15 aa, Homo sapiens
  Heavy chain CDR3 for antibody 2572 (IGHV1-46)
AREKYYGSGSYPFDY

SEQ ID NO: 5145 - protein, 9 aa, Homo sapiens
  Light chain CDR3 for antibody 2573 (IGKV1-9)
QQLNSHPFT

SEQ ID NO: 5146 - protein, 15 aa, Homo sapiens
  Heavy chain CDR3 for antibody 2573 (IGHV1-46)
AREKYYGSGSYPFDY

SEQ ID NO: 5147 - protein, 9 aa, Homo sapiens
  Light chain CDR3 for antibody 2574 (IGKV1-17)
LQHNSYPPT

SEQ ID NO: 5148 - protein, 19 aa, Homo sapiens
  Heavy chain CDR3 for antibody 2574 (IGHV1-18)
ARDHGYCSSTSCYRAWFDP

SEQ ID NO: 5149 - protein, 9 aa, Homo sapiens
  Light chain CDR3 for antibody 2575 (IGKV1-8)
QQYYSYPLT

SEQ ID NO: 5150 - protein, 14 aa, Homo sapiens
  Heavy chain CDR3 for antibody 2575 (IGHV3-23)
AKDRAVAGTYYFDY

SEQ ID NO: 5151 - protein, 9 aa, Homo sapiens
  Light chain CDR3 for antibody 2576 (IGKV6-21)
HQSSSLPYT

SEQ ID NO: 5152 - protein, 10 aa, Homo sapiens
  Heavy chain CDR3 for antibody 2576 (IGHV3-33)
ARESTDGMDV

SEQ ID NO: 5153 - protein, 9 aa, Homo sapiens
  Light chain CDR3 for antibody 2577 (IGKV6-21)
HQSSSLPYT

SEQ ID NO: 5154 - protein, 17 aa, Homo sapiens
  Heavy chain CDR3 for antibody 2577 (IGHV3-33)
AREITMVRGDNYYGMDV

SEQ ID NO: 5155 - protein, 9 aa, Homo sapiens
  Light chain CDR3 for antibody 2578 (IGKV1-9)
HQLNSYPYT

SEQ ID NO: 5156 - protein, 15 aa, Homo sapiens
  Heavy chain CDR3 for antibody 2578 (IGHV1-46)
AREKYHGSGSYPFAS

SEQ ID NO: 5157 - protein, 9 aa, Homo sapiens
  Light chain CDR3 for antibody 2579 (IGKV1-9)
QQLNSYPFT

SEQ ID NO: 5158 - protein, 17 aa, Homo sapiens
  Heavy chain CDR3 for antibody 2579 (IGHV3-33)
VREITMVRGDNYYGLDV

SEQ ID NO: 5159 - protein, 9 aa, Homo sapiens
  Light chain CDR3 for antibody 2580 (IGKV3-20)
QQYGSSPLT

SEQ ID NO: 5160 - protein, 8 aa, Homo sapiens
  Heavy chain CDR3 for antibody 2580 (IGHV4-59)
ASGACFDY

SEQ ID NO: 5161 - protein, 9 aa, Homo sapiens
  Light chain CDR3 for antibody 2581 (IGKV3-20)
QQYGSSPLT

SEQ ID NO: 5162 - protein, 13 aa, Homo sapiens
  Heavy chain CDR3 for antibody 2581 (IGHV1-24)
ATGYSGYEDYFDY

SEQ ID NO: 5163 - protein, 9 aa, Homo sapiens
  Light chain CDR3 for antibody 2582 (IGKV6-21)
HQSSSLPYT

SEQ ID NO: 5164 - protein, 14 aa, Homo sapiens
  Heavy chain CDR3 for antibody 2582 (IGHV1-18)
AREGYSGYLVYFDY

SEQ ID NO: 5165 - protein, 9 aa, Homo sapiens
  Light chain CDR3 for antibody 2583 (IGKV1-9)
QQLNSYPFT

SEQ ID NO: 5166 - protein, 10 aa, Homo sapiens
  Heavy chain CDR3 for antibody 2583 (IGHV3-33)
AREGRTGFDY

SEQ ID NO: 5167 - protein, 9 aa, Homo sapiens
  Light chain CDR3 for antibody 2584 (IGKV1-9)
QHLNSHPFT

SEQ ID NO: 5168 - protein, 10 aa, Homo sapiens
  Heavy chain CDR3 for antibody 2584 (IGHV3-33)
ARESTDGMDA

SEQ ID NO: 5169 - protein, 10 aa, Homo sapiens
  Light chain CDR3 for antibody 2585 (IGKV2D-28)
MQAPQTPPYT

SEQ ID NO: 5170 - protein, 19 aa, Homo sapiens
  Heavy chain CDR3 for antibody 2585 (IGHV1-18)
ARDHGYCSSTSCYRAWFDP

SEQ ID NO: 5171 - protein, 9 aa, Homo sapiens
  Light chain CDR3 for antibody 2586 (IGKV1-9)
QQLNSYPLT

SEQ ID NO: 5172 - protein, 15 aa, Homo sapiens
  Heavy chain CDR3 for antibody 2586 (IGHV1-46)
AREGLTGYYPNWFDP

SEQ ID NO: 5173 - protein, 9 aa, Homo sapiens
  Light chain CDR3 for antibody 2587 (IGKV1D-17)
LQHNSYPYT

SEQ ID NO: 5174 - protein, 10 aa, Homo sapiens
  Heavy chain CDR3 for antibody 2587 (IGHV3-33)
ARESTDGMAA

SEQ ID NO: 5175 - protein, 9 aa, Homo sapiens
  Light chain CDR3 for antibody 2588 (IGKV1-9)
HQLNSYPYT

SEQ ID NO: 5176 - protein, 17 aa, Homo sapiens
  Heavy chain CDR3 for antibody 2588 (IGHV3-33)
AREITMVRGDNYYGLDV

SEQ ID NO: 5177 - protein, 9 aa, Homo sapiens
  Light chain CDR3 for antibody 2589 (IGKV1-9)
QQLNSYPFT

SEQ ID NO: 5178 - protein, 9 aa, Homo sapiens
  Heavy chain CDR3 for antibody 2589 (IGHV3-66)
AREGAGIDY

SEQ ID NO: 5179 - protein, 9 aa, Homo sapiens
  Light chain CDR3 for antibody 2590 (IGKV3-11)
QQRSNWPWT

SEQ ID NO: 5180 - protein, 19 aa, Homo sapiens
  Heavy chain CDR3 for antibody 2590 (IGHV1-18)
ARDHGYCSSTSCYRAWFDP

SEQ ID NO: 5181 - protein, 9 aa, Homo sapiens
  Light chain CDR3 for antibody 2591 (IGKV1-6)
LQDYNYPPT

SEQ ID NO: 5182 - protein, 19 aa, Homo sapiens
  Heavy chain CDR3 for antibody 2591 (IGHV1-2)
ARDHGYCSSTSCYRAWFDP

SEQ ID NO: 5183 - protein, 9 aa, Homo sapiens
  Light chain CDR3 for antibody 2592 (IGKV1-8)
LQDYNYPRT

SEQ ID NO: 5184 - protein, 17 aa, Homo sapiens
  Heavy chain CDR3 for antibody 2592 (IGHV1-18)
AREGIITMVRGVITFDY

SEQ ID NO: 5185 - protein, 9 aa, Homo sapiens
  Light chain CDR3 for antibody 2593 (IGKV1D-17)
LQHNSYPYT

SEQ ID NO: 5186 - protein, 10 aa, Homo sapiens
  Heavy chain CDR3 for antibody 2593 (IGHV3-33)
AREATDGMDA

SEQ ID NO: 5187 - protein, 9 aa, Homo sapiens
  Light chain CDR3 for antibody 2594 (IGKV1D-17)
LQHNSYPYT

SEQ ID NO: 5188 - protein, 10 aa, Homo sapiens
  Heavy chain CDR3 for antibody 2594 (IGHV3-33)
ARESTYAIDV

SEQ ID NO: 5189 - protein, 9 aa, Homo sapiens
  Light chain CDR3 for antibody 2595 (IGKV1D-17)
LQHNSYPYT

SEQ ID NO: 5190 - protein, 10 aa, Homo sapiens
  Heavy chain CDR3 for antibody 2595 (IGHV3-33)
AREATDGFDY

SEQ ID NO: 5191 - protein, 9 aa, Homo sapiens
  Light chain CDR3 for antibody 2596 (IGKV3D-7)
QQDYNLPWT

SEQ ID NO: 5192 - protein, 10 aa, Homo sapiens
  Heavy chain CDR3 for antibody 2596 (IGHV1-18)
ARVTLSGMDV

SEQ ID NO: 5193 - protein, 9 aa, Homo sapiens
  Light chain CDR3 for antibody 2597 (IGKV1-9)
QQFNSYPFT

SEQ ID NO: 5194 - protein, 17 aa, Homo sapiens
  Heavy chain CDR3 for antibody 2597 (IGHV3-33)
AREITVVRGDNYYGMDV

SEQ ID NO: 5195 - protein, 9 aa, Homo sapiens
  Light chain CDR3 for antibody 2598 (IGKV1-9)
QQLNSHPFT

SEQ ID NO: 5196 - protein, 17 aa, Homo sapiens
  Heavy chain CDR3 for antibody 2598 (IGHV3-33)
AREITMVRGDNYYGMEA

SEQ ID NO: 5197 - protein, 9 aa, Homo sapiens
  Light chain CDR3 for antibody 2599 (IGKV1D-16)
QQYNSYPYT

SEQ ID NO: 5198 - protein, 15 aa, Homo sapiens
  Heavy chain CDR3 for antibody 2599 (IGHV4-59)
AQLLWFGDLSGWFDP

SEQ ID NO: 5199 - protein, 9 aa, Homo sapiens
  Light chain CDR3 for antibody 2600 (IGKV1-6)
LQDYNYPYT

SEQ ID NO: 5200 - protein, 16 aa, Homo sapiens
  Heavy chain CDR3 for antibody 2600 (IGHV3-23)
AKDSGSYHYYYYGMDV

SEQ ID NO: 5201 - protein, 9 aa, Homo sapiens
  Light chain CDR3 for antibody 2601 (IGKV1-9)
HQLISYPYT

SEQ ID NO: 5202 - protein, 10 aa, Homo sapiens
  Heavy chain CDR3 for antibody 2601 (IGHV3-33)
ARESTDGMDV

SEQ ID NO: 5203 - protein, 9 aa, Homo sapiens
  Light chain CDR3 for antibody 2602 (IGKV1D-16)
LQDYNYPYT

SEQ ID NO: 5204 - protein, 13 aa, Homo sapiens
  Heavy chain CDR3 for antibody 2602 (IGHV1-24)
ATHYDILTGYFDY

SEQ ID NO: 5205 - protein, 9 aa, Homo sapiens
  Light chain CDR3 for antibody 2603 (IGKV1-9)
QQLNSYPFT

SEQ ID NO: 5206 - protein, 13 aa, Homo sapiens
  Heavy chain CDR3 for antibody 2603 (IGHV1-24)
ATTYSGYAYYFDY

SEQ ID NO: 5207 - protein, 9 aa, Homo sapiens
  Light chain CDR3 for antibody 2604 (IGKV1-17)
LQHNSYPWT

SEQ ID NO: 5208 - protein, 17 aa, Homo sapiens
  Heavy chain CDR3 for antibody 2604 (IGHV1-18)
AREDWNDGYYYYYGMDV

SEQ ID NO: 5209 - protein, 9 aa, Homo sapiens
  Light chain CDR3 for antibody 2605 (IGKV6-21)
HQSSSLPLT

SEQ ID NO: 5210 - protein, 19 aa, Homo sapiens
  Heavy chain CDR3 for antibody 2605 (IGHV3-33)
AREDSSSWYPDYYYYGMDV

SEQ ID NO: 5211 - protein, 9 aa, Homo sapiens
  Light chain CDR3 for antibody 2606 (IGKV1-9)
QQFNSYPFT

SEQ ID NO: 5212 - protein, 17 aa, Homo sapiens
  Heavy chain CDR3 for antibody 2606 (IGHV3-33)
GREITMVRGDNYYGMDV

SEQ ID NO: 5213 - protein, 9 aa, Homo sapiens
  Light chain CDR3 for antibody 2607 (IGKV1-9)
QQLNSHPFT

SEQ ID NO: 5214 - protein, 17 aa, Homo sapiens
  Heavy chain CDR3 for antibody 2607 (IGHV3-33)
AREITMVRGDTSYGMDV

SEQ ID NO: 5215 - protein, 9 aa, Homo sapiens
  Light chain CDR3 for antibody 2608 (IGKV1-8)
QQYYSYPLT

SEQ ID NO: 5216 - protein, 16 aa, Homo sapiens
  Heavy chain CDR3 for antibody 2608 (IGHV3-33)
ARDRDIVAKGEYYFDY

SEQ ID NO: 5217 - protein, 9 aa, Homo sapiens
  Light chain CDR3 for antibody 2609 (IGKV1-9)
QQLNSYPFT

SEQ ID NO: 5218 - protein, 10 aa, Homo sapiens
  Heavy chain CDR3 for antibody 2609 (IGHV3-33)
ARESGEGFDY

SEQ ID NO: 5219 - protein, 9 aa, Homo sapiens
  Light chain CDR3 for antibody 2610 (IGKV1-27)
QKYNSAPYT

SEQ ID NO: 5220 - protein, 13 aa, Homo sapiens
  Heavy chain CDR3 for antibody 2610 (IGHV3-33)
ARVLRYFDPDFDY

SEQ ID NO: 5221 - protein, 9 aa, Homo sapiens
  Light chain CDR3 for antibody 2611 (IGKV1-6)
LQDYNYPFT

SEQ ID NO: 5222 - protein, 10 aa, Homo sapiens
  Heavy chain CDR3 for antibody 2611 (IGHV3-33)
ARGVWFGADY

SEQ ID NO: 5223 - protein, 9 aa, Homo sapiens
  Light chain CDR3 for antibody 2612 (IGKV1-9)
HQLNSYPYT

SEQ ID NO: 5224 - protein, 15 aa, Homo sapiens
  Heavy chain CDR3 for antibody 2612 (IGHV1-46)
AREKYHGSGTYPIDY

SEQ ID NO: 5225 - protein, 9 aa, Homo sapiens
  Light chain CDR3 for antibody 2613 (IGKV1-9)
QQLNGYPYT

SEQ ID NO: 5226 - protein, 15 aa, Homo sapiens
  Heavy chain CDR3 for antibody 2613 (IGHV1-46)
AREKSYGSGSYPIDY

SEQ ID NO: 5227 - protein, 9 aa, Homo sapiens
  Light chain CDR3 for antibody 2614 (IGKV1-8)
QQYYSYPFT

SEQ ID NO: 5228 - protein, 14 aa, Homo sapiens
  Heavy chain CDR3 for antibody 2614 (IGHV3-23)
AKAIAVAGTWYFDL

SEQ ID NO: 5229 - protein, 8 aa, Homo sapiens
  Light chain CDR3 for antibody 2615 (IGKV1D-13)
QQFNNYPT

SEQ ID NO: 5230 - protein, 18 aa, Homo sapiens
  Heavy chain CDR3 for antibody 2615 (IGHV3-11)
ARDRGIAAAGTYYYGMDV

SEQ ID NO: 5231 - protein, 9 aa, Homo sapiens
  Light chain CDR3 for antibody 2616 (IGKV6-21)
HQSSSLPHT

SEQ ID NO: 5232 - protein, 17 aa, Homo sapiens
  Heavy chain CDR3 for antibody 2616 (IGHV1-18)
AREGAWFGELLSYYFDY

SEQ ID NO: 5233 - protein, 9 aa, Homo sapiens
  Light chain CDR3 for antibody 2617 (IGKV1-27)
QKYNSAPLT

SEQ ID NO: 5234 - protein, 17 aa, Homo sapiens
  Heavy chain CDR3 for antibody 2617 (IGHV3-33)
AREITMVRGDNYYGMDV

SEQ ID NO: 5235 - protein, 9 aa, Homo sapiens
  Light chain CDR3 for antibody 2618 (IGKV1-9)
QQFNSHPFT

SEQ ID NO: 5236 - protein, 17 aa, Homo sapiens
  Heavy chain CDR3 for antibody 2618 (IGHV3-33)
AREITMVRGDNYYGMDV

SEQ ID NO: 5237 - protein, 9 aa, Homo sapiens
  Light chain CDR3 for antibody 2619 (IGKV1-9)
QQFNSYPFT

SEQ ID NO: 5238 - protein, 17 aa, Homo sapiens
  Heavy chain CDR3 for antibody 2619 (IGHV3-30)
AREITMVRGDNYYALDV

SEQ ID NO: 5239 - protein, 9 aa, Homo sapiens
  Light chain CDR3 for antibody 2620 (IGKV1-9)
HQLNSYPYT

SEQ ID NO: 5240 - protein, 16 aa, Homo sapiens
  Heavy chain CDR3 for antibody 2620 (IGHV1-18)
AREGETMVRGVIAFDY

SEQ ID NO: 5241 - protein, 9 aa, Homo sapiens
  Light chain CDR3 for antibody 2621 (IGKV1D-17)
LQHNSYPYT

SEQ ID NO: 5242 - protein, 17 aa, Homo sapiens
  Heavy chain CDR3 for antibody 2621 (IGHV3-33)
AREVTMVRGDNYYGLDV

SEQ ID NO: 5243 - protein, 9 aa, Homo sapiens
  Light chain CDR3 for antibody 2622 (IGKV3-15)
QQYNNWPRT

SEQ ID NO: 5244 - protein, 17 aa, Homo sapiens
  Heavy chain CDR3 for antibody 2622 (IGHV3-33)
AREITMVRGDNYYGMDV

SEQ ID NO: 5245 - protein, 9 aa, Homo sapiens
  Light chain CDR3 for antibody 2623 (IGKV1D-17)
LQHNSYPYT

SEQ ID NO: 5246 - protein, 10 aa, Homo sapiens
  Heavy chain CDR3 for antibody 2623 (IGHV3-33)
AGDATDGMDV

SEQ ID NO: 5247 - protein, 9 aa, Homo sapiens
  Light chain CDR3 for antibody 2624 (IGKV1-9)
QQLNSYPFT

SEQ ID NO: 5248 - protein, 13 aa, Homo sapiens
  Heavy chain CDR3 for antibody 2624 (IGHV3-33)
ARDWYYGSGSPYY

SEQ ID NO: 5249 - protein, 9 aa, Homo sapiens
  Light chain CDR3 for antibody 2625 (IGKV1-9)
QHLNSHPFT

SEQ ID NO: 5250 - protein, 17 aa, Homo sapiens
  Heavy chain CDR3 for antibody 2625 (IGHV3-33)
ARESTMVRGDNYYGMDV

SEQ ID NO: 5251 - protein, 9 aa, Homo sapiens
  Light chain CDR3 for antibody 2626 (IGKV1-9)
QQLISYPYT

SEQ ID NO: 5252 - protein, 15 aa, Homo sapiens
  Heavy chain CDR3 for antibody 2626 (IGHV1-46)
AREKYYGSGSYPIAS

SEQ ID NO: 5253 - protein, 9 aa, Homo sapiens
  Light chain CDR3 for antibody 2627 (IGKV1-9)
QQLNSYPYT

SEQ ID NO: 5254 - protein, 19 aa, Homo sapiens
  Heavy chain CDR3 for antibody 2627 (IGHV3-33)
AREDSSSWYPDYYYYGMDV

SEQ ID NO: 5255 - protein, 9 aa, Homo sapiens
  Light chain CDR3 for antibody 2628 (IGKV1-8)
QQANSFPWT

SEQ ID NO: 5256 - protein, 14 aa, Homo sapiens
  Heavy chain CDR3 for antibody 2628 (IGHV3-23)
AKNDILTGLRYFDL

SEQ ID NO: 5257 - protein, 9 aa, Homo sapiens
  Light chain CDR3 for antibody 2629 (IGKV1-9)
QQLNSYPFT

SEQ ID NO: 5258 - protein, 17 aa, Homo sapiens
  Heavy chain CDR3 for antibody 2629 (IGHV3-33)
AREIARVRGDNYYGLDV

SEQ ID NO: 5259 - protein, 9 aa, Homo sapiens
  Light chain CDR3 for antibody 2630 (IGKV1D-17)
QQLNGYPYT

SEQ ID NO: 5260 - protein, 15 aa, Homo sapiens
  Heavy chain CDR3 for antibody 2630 (IGHV1-46)
AREKYYGSGSYPFAS

SEQ ID NO: 5261 - protein, 9 aa, Homo sapiens
  Light chain CDR3 for antibody 2631 (IGKV3D-20)
QQYGSSPWT

SEQ ID NO: 5262 - protein, 15 aa, Homo sapiens
  Heavy chain CDR3 for antibody 2631 (IGHV1-46)
AREKYYGSGSYPFDY

SEQ ID NO: 5263 - protein, 9 aa, Homo sapiens
  Light chain CDR3 for antibody 2632 (IGKV1D-17)
LQHNSYPYT

SEQ ID NO: 5264 - protein, 10 aa, Homo sapiens
  Heavy chain CDR3 for antibody 2632 (IGHV3-33)
ASEATDGMEV

SEQ ID NO: 5265 - protein, 9 aa, Homo sapiens
  Light chain CDR3 for antibody 2633 (IGKV1-6)
LQDYNYPWT

SEQ ID NO: 5266 - protein, 13 aa, Homo sapiens
  Heavy chain CDR3 for antibody 2633 (IGHV1-24)
ATTYSGYAYYFDY

SEQ ID NO: 5267 - protein, 9 aa, Homo sapiens
  Light chain CDR3 for antibody 2634 (IGKV1-6)
LQDYNYPWT

SEQ ID NO: 5268 - protein, 17 aa, Homo sapiens
  Heavy chain CDR3 for antibody 2634 (IGHV1-46)
ARVYGDYGGYYYYGMDV

SEQ ID NO: 5269 - protein, 9 aa, Homo sapiens
  Light chain CDR3 for antibody 2635 (IGKV1-9)
QQFNSHPFT

SEQ ID NO: 5270 - protein, 10 aa, Homo sapiens
  Heavy chain CDR3 for antibody 2635 (IGHV3-33)
ARESVAGFDY

SEQ ID NO: 5271 - protein, 9 aa, Homo sapiens
  Light chain CDR3 for antibody 2636 (IGKV1-16)
QQYNSYPYT

SEQ ID NO: 5272 - protein, 16 aa, Homo sapiens
  Heavy chain CDR3 for antibody 2636 (IGHV3-33)
ARDFLAVAGTWNWFDP

SEQ ID NO: 5273 - protein, 9 aa, Homo sapiens
  Light chain CDR3 for antibody 2637 (IGKV1D-17)
LQHNSYPYT

SEQ ID NO: 5274 - protein, 15 aa, Homo sapiens
  Heavy chain CDR3 for antibody 2637 (IGHV1-46)
AREKYHGSGSYPFDY

SEQ ID NO: 5275 - protein, 9 aa, Homo sapiens
  Light chain CDR3 for antibody 2638 (IGKV1-9)
QQLNSYPYT

SEQ ID NO: 5276 - protein, 15 aa, Homo sapiens
  Heavy chain CDR3 for antibody 2638 (IGHV1-46)
AREKSYGSGSSPFAY

SEQ ID NO: 5277 - protein, 9 aa, Homo sapiens
  Light chain CDR3 for antibody 2639 (IGKV3D-20)
QQYGSSPWT

SEQ ID NO: 5278 - protein, 16 aa, Homo sapiens
  Heavy chain CDR3 for antibody 2639 (IGHV1-18)
AREGDTMVRGVIAFDY

SEQ ID NO: 5279 - protein, 9 aa, Homo sapiens
  Light chain CDR3 for antibody 2640 (IGKV1-6)
LQYYSYPFT

SEQ ID NO: 5280 - protein, 12 aa, Homo sapiens
  Heavy chain CDR3 for antibody 2640 (IGHV4-39)
ARQGSYLSWFDP

SEQ ID NO: 5281 - protein, 9 aa, Homo sapiens
  Light chain CDR3 for antibody 2641 (IGKV1-8)
QQYYSYPLT

SEQ ID NO: 5282 - protein, 17 aa, Homo sapiens
  Heavy chain CDR3 for antibody 2641 (IGHV3-33)
AREITMVRGDNYYGMDV

SEQ ID NO: 5283 - protein, 9 aa, Homo sapiens
  Light chain CDR3 for antibody 2642 (IGKV1D-17)
LQHNSYPYT

SEQ ID NO: 5284 - protein, 17 aa, Homo sapiens
  Heavy chain CDR3 for antibody 2642 (IGHV3-33)
VREITMVRGDNYYGLDV

SEQ ID NO: 5285 - protein, 9 aa, Homo sapiens
  Light chain CDR3 for antibody 2643 (IGKV1-9)
HQLNSYPYT

SEQ ID NO: 5286 - protein, 10 aa, Homo sapiens
  Heavy chain CDR3 for antibody 2643 (IGHV3-33)
AREAVAGFDY

SEQ ID NO: 5287 - protein, 9 aa, Homo sapiens
  Light chain CDR3 for antibody 2644 (IGKV1D-17)
LQHNSYPYT

SEQ ID NO: 5288 - protein, 10 aa, Homo sapiens
  Heavy chain CDR3 for antibody 2644 (IGHV3-33)
ARDSTAGMDA

SEQ ID NO: 5289 - protein, 9 aa, Homo sapiens
  Light chain CDR3 for antibody 2645 (IGKV1D-17)
LQHNSYPYT

SEQ ID NO: 5290 - protein, 10 aa, Homo sapiens
  Heavy chain CDR3 for antibody 2645 (IGHV3-33)
AREATAGIDV

SEQ ID NO: 5291 - protein, 9 aa, Homo sapiens
  Light chain CDR3 for antibody 2646 (IGKV1D-16)
QQYNSYPLT

SEQ ID NO: 5292 - protein, 16 aa, Homo sapiens
  Heavy chain CDR3 for antibody 2646 (IGHV3-23)
AKEYYYGSGSYSLFDY

SEQ ID NO: 5293 - protein, 9 aa, Homo sapiens
  Light chain CDR3 for antibody 2647 (IGKV6-21)
HQSSSLPQT

SEQ ID NO: 5294 - protein, 17 aa, Homo sapiens
  Heavy chain CDR3 for antibody 2647 (IGHV4-39)
ASQRGYSGYDPYWYFDL

SEQ ID NO: 5295 - protein, 9 aa, Homo sapiens
  Light chain CDR3 for antibody 2648 (IGKV1-9)
QQLNSHPFT

SEQ ID NO: 5296 - protein, 17 aa, Homo sapiens
  Heavy chain CDR3 for antibody 2648 (IGHV3-33)
AREINMGRGDNYYGMDV

SEQ ID NO: 5297 - protein, 9 aa, Homo sapiens
  Light chain CDR3 for antibody 2649 (IGKV1-17)
LQHNSYPWT

SEQ ID NO: 5298 - protein, 19 aa, Homo sapiens
  Heavy chain CDR3 for antibody 2649 (IGHV3-11)
AREDSSSWYPDYYYYGMDV

SEQ ID NO: 5299 - protein, 9 aa, Homo sapiens
  Light chain CDR3 for antibody 2650 (IGKV3-11)
QQRSNWPWT

SEQ ID NO: 5300 - protein, 14 aa, Homo sapiens
  Heavy chain CDR3 for antibody 2650 (IGHV3-13)
ARENYYGSGSYFDY

SEQ ID NO: 5301 - protein, 9 aa, Homo sapiens
  Light chain CDR3 for antibody 2651 (IGKV1D-16)
LQDYNYPYT

SEQ ID NO: 5302 - protein, 17 aa, Homo sapiens
  Heavy chain CDR3 for antibody 2651 (IGHV3-33)
AREITMVRGDNYYGMDV

SEQ ID NO: 5303 - protein, 9 aa, Homo sapiens
  Light chain CDR3 for antibody 2652 (IGKV1-6)
LQDYNYPWT

SEQ ID NO: 5304 - protein, 18 aa, Homo sapiens
  Heavy chain CDR3 for antibody 2652 (IGHV3-33)
ARYGDPERDYYYYYGMDV

SEQ ID NO: 5305 - protein, 9 aa, Homo sapiens
  Light chain CDR3 for antibody 2653 (IGKV1-17)
LQHNSYPLT

SEQ ID NO: 5306 - protein, 16 aa, Homo sapiens
  Heavy chain CDR3 for antibody 2653 (IGHV3-23)
AKDSGSYHYYYYGMDV

SEQ ID NO: 5307 - protein, 9 aa, Homo sapiens
  Light chain CDR3 for antibody 2654 (IGKV1D-16)
QQYGSSPRT

SEQ ID NO: 5308 - protein, 15 aa, Homo sapiens
  Heavy chain CDR3 for antibody 2654 (IGHV1-18)
ASYSGSYYYYYGMDV

SEQ ID NO: 5309 - protein, 9 aa, Homo sapiens
  Light chain CDR3 for antibody 2655 (IGKV1-9)
QHLNSHPFT

SEQ ID NO: 5310 - protein, 17 aa, Homo sapiens
  Heavy chain CDR3 for antibody 2655 (IGHV3-33)
AREITMVRGDNYYGMAV

SEQ ID NO: 5311 - protein, 9 aa, Homo sapiens
  Light chain CDR3 for antibody 2656 (IGKV1-6)
LQDYNYPLT

SEQ ID NO: 5312 - protein, 9 aa, Homo sapiens
  Heavy chain CDR3 for antibody 2656 (IGHV3-66)
AREGDYIDY

SEQ ID NO: 5313 - protein, 9 aa, Homo sapiens
  Light chain CDR3 for antibody 2657 (IGKV3D-20)
QQANSFPWT

SEQ ID NO: 5314 - protein, 15 aa, Homo sapiens
  Heavy chain CDR3 for antibody 2657 (IGHV1-46)
AREKYYGSGSYPFDY

SEQ ID NO: 5315 - protein, 7 aa, Homo sapiens
  Light chain CDR3 for antibody 2658 (IGKV1D-13)
QQFNNYT

SEQ ID NO: 5316 - protein, 14 aa, Homo sapiens
  Heavy chain CDR3 for antibody 2658 (IGHV3-33)
ARETMVRGVRGFDP

SEQ ID NO: 5317 - protein, 9 aa, Homo sapiens
  Light chain CDR3 for antibody 2659 (IGKV1-9)
QQLNSYPFT

SEQ ID NO: 5318 - protein, 17 aa, Homo sapiens
  Heavy chain CDR3 for antibody 2659 (IGHV3-33)
AREITMVRGDNSYGLDV

SEQ ID NO: 5319 - protein, 9 aa, Homo sapiens
  Light chain CDR3 for antibody 2660 (IGKV1-9)
QQLNSYPFT

SEQ ID NO: 5320 - protein, 15 aa, Homo sapiens
  Heavy chain CDR3 for antibody 2660 (IGHV1-46)
AREKYYGSGSYPFDS

SEQ ID NO: 5321 - protein, 9 aa, Homo sapiens
  Light chain CDR3 for antibody 2661 (IGKV6-21)
HQSSSLPYT

SEQ ID NO: 5322 - protein, 10 aa, Homo sapiens
  Heavy chain CDR3 for antibody 2661 (IGHV1-18)
AREAVAGFDY

SEQ ID NO: 5323 - protein, 9 aa, Homo sapiens
  Light chain CDR3 for antibody 2662 (IGKV1-8)
QQYYSYPYT

SEQ ID NO: 5324 - protein, 10 aa, Homo sapiens
  Heavy chain CDR3 for antibody 2662 (IGHV3-33)
ARESTDGMDV

SEQ ID NO: 5325 - protein, 9 aa, Homo sapiens
  Light chain CDR3 for antibody 2663 (IGKV1-12)
QQANSFPWT

SEQ ID NO: 5326 - protein, 13 aa, Homo sapiens
  Heavy chain CDR3 for antibody 2663 (IGHV1-24)
ATTYSGYAYYFDY

SEQ ID NO: 5327 - protein, 9 aa, Homo sapiens
  Light chain CDR3 for antibody 2664 (IGKV1-9)
QQLNSYPFT

SEQ ID NO: 5328 - protein, 17 aa, Homo sapiens
  Heavy chain CDR3 for antibody 2664 (IGHV3-33)
AREITMGRGDNYYGLDV

SEQ ID NO: 5329 - protein, 9 aa, Homo sapiens
  Light chain CDR3 for antibody 2665 (IGKV6-21)
HQSSSLPYT

SEQ ID NO: 5330 - protein, 19 aa, Homo sapiens
  Heavy chain CDR3 for antibody 2665 (IGHV1-18)
ARDHGYCSSTSCYRAWFDP

SEQ ID NO: 5331 - protein, 9 aa, Homo sapiens
  Light chain CDR3 for antibody 2666 (IGKV1-6)
LQDYNYPYT

SEQ ID NO: 5332 - protein, 15 aa, Homo sapiens
  Heavy chain CDR3 for antibody 2666 (IGHV4-39)
ASRESGYSSGWYEDY

SEQ ID NO: 5333 - protein, 9 aa, Homo sapiens
  Light chain CDR3 for antibody 2667 (IGKV1-9)
QQLNSYPFT

SEQ ID NO: 5334 - protein, 15 aa, Homo sapiens
  Heavy chain CDR3 for antibody 2667 (IGHV1-46)
AREKYHGSGSYPFEY

SEQ ID NO: 5335 - protein, 9 aa, Homo sapiens
  Light chain CDR3 for antibody 2668 (IGKV6-21)
HQSSSLPYT

SEQ ID NO: 5336 - protein, 13 aa, Homo sapiens
  Heavy chain CDR3 for antibody 2668 (IGHV1-24)
ATHYDILTGYFDY

SEQ ID NO: 5337 - protein, 9 aa, Homo sapiens
  Light chain CDR3 for antibody 2669 (IGKV5-2)
LQHDNFPYT

SEQ ID NO: 5338 - protein, 9 aa, Homo sapiens
  Heavy chain CDR3 for antibody 2669 (IGHV3-33)
AREGAGVDY

SEQ ID NO: 5339 - protein, 9 aa, Homo sapiens
  Light chain CDR3 for antibody 2670 (IGKV1-27)
QKYNSAPLT

SEQ ID NO: 5340 - protein, 10 aa, Homo sapiens
  Heavy chain CDR3 for antibody 2670 (IGHV3-33)
ARESTDGMDV

SEQ ID NO: 5341 - protein, 9 aa, Homo sapiens
  Light chain CDR3 for antibody 2671 (IGKV1-9)
QQFNSHPFT

SEQ ID NO: 5342 - protein, 10 aa, Homo sapiens
  Heavy chain CDR3 for antibody 2671 (IGHV3-33)
ARESTDGMDV

SEQ ID NO: 5343 - protein, 9 aa, Homo sapiens
  Light chain CDR3 for antibody 2672 (IGKV1-9)
QQLDSYPFI

SEQ ID NO: 5344 - protein, 17 aa, Homo sapiens
  Heavy chain CDR3 for antibody 2672 (IGHV3-33)
AREITMVRGDNYYGLDV

SEQ ID NO: 5345 - protein, 9 aa, Homo sapiens
  Light chain CDR3 for antibody 2673 (IGKV1-17)
QQLNSYPYT

SEQ ID NO: 5346 - protein, 13 aa, Homo sapiens
  Heavy chain CDR3 for antibody 2673 (IGHV1-24)
ATDYGDYRYYFDY

SEQ ID NO: 5347 - protein, 9 aa, Homo sapiens
  Light chain CDR3 for antibody 2674 (IGKV1-9)
QQFNSHPFT

SEQ ID NO: 5348 - protein, 15 aa, Homo sapiens
  Heavy chain CDR3 for antibody 2674 (IGHV1-46)
AREKYHGSGSYPFDY

SEQ ID NO: 5349 - protein, 9 aa, Homo sapiens
  Light chain CDR3 for antibody 2675 (IGKV1-39)
QQSYSTPYT

SEQ ID NO: 5350 - protein, 13 aa, Homo sapiens
  Heavy chain CDR3 for antibody 2675 (IGHV1-24)
ATDYGDYRYYFDY

SEQ ID NO: 5351 - protein, 9 aa, Homo sapiens
  Light chain CDR3 for antibody 2676 (IGKV1D-16)
QQYNSYPYT

SEQ ID NO: 5352 - protein, 17 aa, Homo sapiens
  Heavy chain CDR3 for antibody 2676 (IGHV3-33)
ARDRATVTLYYYYGMDV

SEQ ID NO: 5353 - protein, 9 aa, Homo sapiens
  Light chain CDR3 for antibody 2677 (IGKV1-17)
LQHNSYPYT

SEQ ID NO: 5354 - protein, 11 aa, Homo sapiens
  Heavy chain CDR3 for antibody 2677 (IGHV3-11)
AREGPNWDFDY

SEQ ID NO: 5355 - protein, 9 aa, Homo sapiens
  Light chain CDR3 for antibody 2678 (IGKV1-9)
QQLNSYPFT

SEQ ID NO: 5356 - protein, 17 aa, Homo sapiens
  Heavy chain CDR3 for antibody 2678 (IGHV3-33)
VRESTMVRGENYYGLDV

SEQ ID NO: 5357 - protein, 9 aa, Homo sapiens
  Light chain CDR3 for antibody 2679 (IGKV1-9)
QQLNSHPFT

SEQ ID NO: 5358 - protein, 17 aa, Homo sapiens
  Heavy chain CDR3 for antibody 2679 (IGHV3-33)
AREITMFRGDNYYGMDV

SEQ ID NO: 5359 - protein, 9 aa, Homo sapiens
  Light chain CDR3 for antibody 2680 (IGKV1-9)
QHLNSHPFT

SEQ ID NO: 5360 - protein, 10 aa, Homo sapiens
  Heavy chain CDR3 for antibody 2680 (IGHV3-33)
AREAVAGFDY

SEQ ID NO: 5361 - protein, 9 aa, Homo sapiens
  Light chain CDR3 for antibody 2681 (IGKV1D-17)
LQHNSYPYT

SEQ ID NO: 5362 - protein, 10 aa, Homo sapiens
  Heavy chain CDR3 for antibody 2681 (IGHV3-33)
ARESTDGMEA

SEQ ID NO: 5363 - protein, 9 aa, Homo sapiens
  Light chain CDR3 for antibody 2682 (IGKV1D-16)
QQYNSYPYT

SEQ ID NO: 5364 - protein, 14 aa, Homo sapiens
  Heavy chain CDR3 for antibody 2682 (IGHV3-33)
ARENIAVVQGGMDV

SEQ ID NO: 5365 - protein, 9 aa, Homo sapiens
  Light chain CDR3 for antibody 2683 (IGKV3D-20)
QQYGSSPWT

SEQ ID NO: 5366 - protein, 10 aa, Homo sapiens
  Heavy chain CDR3 for antibody 2683 (IGHV3-33)
ARESTDGMDV

SEQ ID NO: 5367 - protein, 9 aa, Homo sapiens
  Light chain CDR3 for antibody 2684 (IGKV3-15)
QQYNNWPRT

SEQ ID NO: 5368 - protein, 10 aa, Homo sapiens
  Heavy chain CDR3 for antibody 2684 (IGHV3-33)
ARESTDGMDV

SEQ ID NO: 5369 - protein, 9 aa, Homo sapiens
  Light chain CDR3 for antibody 2685 (IGKV1-9)
QQLISYPYT

SEQ ID NO: 5370 - protein, 15 aa, Homo sapiens
  Heavy chain CDR3 for antibody 2685 (IGHV1-46)
AREKYYGSGSYPFDA

SEQ ID NO: 5371 - protein, 9 aa, Homo sapiens
  Light chain CDR3 for antibody 2686 (IGKV6-21)
HQSSSLPWT

SEQ ID NO: 5372 - protein, 13 aa, Homo sapiens
  Heavy chain CDR3 for antibody 2686 (IGHV1-24)
ATGYSGYEDYFDY

SEQ ID NO: 5373 - protein, 9 aa, Homo sapiens
  Light chain CDR3 for antibody 2687 (IGKV3D-20)
QQYGSSPWT

SEQ ID NO: 5374 - protein, 17 aa, Homo sapiens
  Heavy chain CDR3 for antibody 2687 (IGHV3-33)
AREITMVRGDNYYGMDV

SEQ ID NO: 5375 - protein, 9 aa, Homo sapiens
  Light chain CDR3 for antibody 2688 (IGKV1D-17)
LQHNSYPYT

SEQ ID NO: 5376 - protein, 10 aa, Homo sapiens
  Heavy chain CDR3 for antibody 2688 (IGHV3-33)
ASASTAGMDV

SEQ ID NO: 5377 - protein, 9 aa, Homo sapiens
  Light chain CDR3 for antibody 2689 (IGKV1-12)
QQANSFPWT

SEQ ID NO: 5378 - protein, 17 aa, Homo sapiens
  Heavy chain CDR3 for antibody 2689 (IGHV3-33)
AREITMVRGDNYYGMDV

SEQ ID NO: 5379 - protein, 9 aa, Homo sapiens
  Light chain CDR3 for antibody 2690 (IGKV1-9)
QQLNSHPFT

SEQ ID NO: 5380 - protein, 17 aa, Homo sapiens
  Heavy chain CDR3 for antibody 2690 (IGHV3-33)
ARESTMVRGENYYGMDV

SEQ ID NO: 5381 - protein, 8 aa, Homo sapiens
  Light chain CDR3 for antibody 2691 (IGKV1D-13)
QQFNNYPT

SEQ ID NO: 5382 - protein, 15 aa, Homo sapiens
  Heavy chain CDR3 for antibody 2691 (IGHV3-33)
ARKGYSSGWYGLADV

SEQ ID NO: 5383 - protein, 9 aa, Homo sapiens
  Light chain CDR3 for antibody 2692 (IGKV1-9)
QQLISYPYT

SEQ ID NO: 5384 - protein, 17 aa, Homo sapiens
  Heavy chain CDR3 for antibody 2692 (IGHV1-46)
AREITLVRGDNYYGMDV

SEQ ID NO: 5385 - protein, 9 aa, Homo sapiens
  Light chain CDR3 for antibody 2693 (IGKV1-9)
QQLNSYPWT

SEQ ID NO: 5386 - protein, 15 aa, Homo sapiens
  Heavy chain CDR3 for antibody 2693 (IGHV3-33)
ARGHYDISYWYGMDV

SEQ ID NO: 5387 - protein, 9 aa, Homo sapiens
  Light chain CDR3 for antibody 2694 (IGKV1-9)
QQFNSHPFT

SEQ ID NO: 5388 - protein, 17 aa, Homo sapiens
  Heavy chain CDR3 for antibody 2694 (IGHV3-33)
EREITMVRGDNYYGLDV

SEQ ID NO: 5389 - protein, 9 aa, Homo sapiens
  Light chain CDR3 for antibody 2695 (IGKV1-9)
QQLNSHPFT

SEQ ID NO: 5390 - protein, 15 aa, Homo sapiens
  Heavy chain CDR3 for antibody 2695 (IGHV3-33)
AREITMVRGVIAFDY

SEQ ID NO: 5391 - protein, 9 aa, Homo sapiens
  Light chain CDR3 for antibody 2696 (IGKV1D-17)
LQHNSYPYT

SEQ ID NO: 5392 - protein, 10 aa, Homo sapiens
  Heavy chain CDR3 for antibody 2696 (IGHV3-33)
AIESPDGMDA

SEQ ID NO: 5393 - protein, 9 aa, Homo sapiens
  Light chain CDR3 for antibody 2697 (IGKV1-9)
QQLNSYPFT

SEQ ID NO: 5394 - protein, 16 aa, Homo sapiens
  Heavy chain CDR3 for antibody 2697 (IGHV3-33)
ARGGSYLVYYYYGMDV

SEQ ID NO: 5395 - protein, 9 aa, Homo sapiens
  Light chain CDR3 for antibody 2698 (IGKV1-6)
LQDYNYPYT

SEQ ID NO: 5396 - protein, 15 aa, Homo sapiens
  Heavy chain CDR3 for antibody 2698 (IGHV3-33)
AREGDIVATYAGMDV

SEQ ID NO: 5397 - protein, 9 aa, Homo sapiens
  Light chain CDR3 for antibody 2699 (IGKV1D-17)
LQHNSYPYT

SEQ ID NO: 5398 - protein, 10 aa, Homo sapiens
  Heavy chain CDR3 for antibody 2699 (IGHV3-33)
AIESTDAMDV

SEQ ID NO: 5399 - protein, 9 aa, Homo sapiens
  Light chain CDR3 for antibody 2700 (IGKV3-11)
QQRSNWPWT

SEQ ID NO: 5400 - protein, 27 aa, Homo sapiens
  Heavy chain CDR3 for antibody 2700 (IGHV3-53)
ARDRHIVVVTADIREDSYYYYYYGMDV

SEQ ID NO: 5401 - protein, 9 aa, Homo sapiens
  Light chain CDR3 for antibody 2701 (IGKV1-9)
QQLNSYPFT

SEQ ID NO: 5402 - protein, 17 aa, Homo sapiens
  Heavy chain CDR3 for antibody 2701 (IGHV3-30)
AREITMIRGDNYYAIDV

SEQ ID NO: 5403 - protein, 9 aa, Homo sapiens
  Light chain CDR3 for antibody 2702 (IGKV1-9)
QQLNSYPFT

SEQ ID NO: 5404 - protein, 17 aa, Homo sapiens
  Heavy chain CDR3 for antibody 2702 (IGHV3-33)
AREITMGRGDNYDGMDV

SEQ ID NO: 5405 - protein, 9 aa, Homo sapiens
  Light chain CDR3 for antibody 2703 (IGKV1-9)
HQLNSYPYT

SEQ ID NO: 5406 - protein, 15 aa, Homo sapiens
  Heavy chain CDR3 for antibody 2703 (IGHV1-46)
AREKYHGAGSYPFDY

SEQ ID NO: 5407 - protein, 9 aa, Homo sapiens
  Light chain CDR3 for antibody 2704 (IGKV1-9)
QQLNGYPYT

SEQ ID NO: 5408 - protein, 17 aa, Homo sapiens
  Heavy chain CDR3 for antibody 2704 (IGHV3-33)
AREVTMVRGDNYYGLDV

SEQ ID NO: 5409 - protein, 9 aa, Homo sapiens
  Light chain CDR3 for antibody 2705 (IGKV1-6)
LQDYNYPYT

SEQ ID NO: 5410 - protein, 15 aa, Homo sapiens
  Heavy chain CDR3 for antibody 2705 (IGHV1-46)
AREKYYGSGSYPFDY

SEQ ID NO: 5411 - protein, 9 aa, Homo sapiens
  Light chain CDR3 for antibody 2706 (IGKV3-11)
QQRSNWPPT

SEQ ID NO: 5412 - protein, 13 aa, Homo sapiens
  Heavy chain CDR3 for antibody 2706 (IGHV3-23)
AKECIAAAGPLDY

SEQ ID NO: 5413 - protein, 9 aa, Homo sapiens
  Light chain CDR3 for antibody 2707 (IGKV1-9)
QQLNSYPFT

SEQ ID NO: 5414 - protein, 17 aa, Homo sapiens
  Heavy chain CDR3 for antibody 2707 (IGHV3-33)
ARESTMARGDNYYGMAV

SEQ ID NO: 5415 - protein, 9 aa, Homo sapiens
  Light chain CDR3 for antibody 2708 (IGKV3D-11)
QQRSNWQYT

SEQ ID NO: 5416 - protein, 19 aa, Homo sapiens
  Heavy chain CDR3 for antibody 2708 (IGHV1-18)
ARDHGYCSSTSRYRAWFDP

SEQ ID NO: 5417 - protein, 9 aa, Homo sapiens
  Light chain CDR3 for antibody 2709 (IGKV1D-17)
LQHNSYPYT

SEQ ID NO: 5418 - protein, 14 aa, Homo sapiens
  Heavy chain CDR3 for antibody 2709 (IGHV1-8)
ARGPIVRGVIRFDY

SEQ ID NO: 5419 - protein, 9 aa, Homo sapiens
  Light chain CDR3 for antibody 2710 (IGKV1-9)
QQLNSYPYT

SEQ ID NO: 5420 - protein, 13 aa, Homo sapiens
  Heavy chain CDR3 for antibody 2710 (IGHV6-1)
ARGKFDYYYGMDV

SEQ ID NO: 5421 - protein, 9 aa, Homo sapiens
  Light chain CDR3 for antibody 2711 (IGKV1-9)
QQLNSYPFT

SEQ ID NO: 5422 - protein, 17 aa, Homo sapiens
  Heavy chain CDR3 for antibody 2711 (IGHV3-11)
AREITMFRGDNYYGIDV

SEQ ID NO: 5423 - protein, 9 aa, Homo sapiens
  Light chain CDR3 for antibody 2712 (IGKV1-9)
QQLNSYPFT

SEQ ID NO: 5424 - protein, 17 aa, Homo sapiens
  Heavy chain CDR3 for antibody 2712 (IGHV3-33)
ARESAIVRGDNYYGMDV

SEQ ID NO: 5425 - protein, 9 aa, Homo sapiens
  Light chain CDR3 for antibody 2713 (IGKV1D-17)
LQHNSYPYT

SEQ ID NO: 5426 - protein, 13 aa, Homo sapiens
  Heavy chain CDR3 for antibody 2713 (IGHV1-24)
ATHYDILTGYFDY

SEQ ID NO: 5427 - protein, 9 aa, Homo sapiens
  Light chain CDR3 for antibody 2714 (IGKV3-20)
QQYGSSPLT

SEQ ID NO: 5428 - protein, 14 aa, Homo sapiens
  Heavy chain CDR3 for antibody 2714 (IGHV4-59)
ARETMVRGVRGFDP

SEQ ID NO: 5429 - protein, 9 aa, Homo sapiens
  Light chain CDR3 for antibody 2715 (IGKV1D-17)
LQHNSYPYT

SEQ ID NO: 5430 - protein, 9 aa, Homo sapiens
  Heavy chain CDR3 for antibody 2715 (IGHV4-34)
ARGRGWFDP

SEQ ID NO: 5431 - protein, 9 aa, Homo sapiens
  Light chain CDR3 for antibody 2716 (IGKV1-9)
QQLNSYPFT

SEQ ID NO: 5432 - protein, 17 aa, Homo sapiens
  Heavy chain CDR3 for antibody 2716 (IGHV3-33)
AREITMFRGENYYGLDV

SEQ ID NO: 5433 - protein, 9 aa, Homo sapiens
  Light chain CDR3 for antibody 2717 (IGKV1-9)
QHLNSHPFT

SEQ ID NO: 5434 - protein, 17 aa, Homo sapiens
  Heavy chain CDR3 for antibody 2717 (IGHV3-30)
AREITMVRGDNYYALDV

SEQ ID NO: 5435 - protein, 9 aa, Homo sapiens
  Light chain CDR3 for antibody 2718 (IGKV1D-17)
LQHNSYPYT

SEQ ID NO: 5436 - protein, 10 aa, Homo sapiens
  Heavy chain CDR3 for antibody 2718 (IGHV3-33)
AIQSTYGMDV

SEQ ID NO: 5437 - protein, 9 aa, Homo sapiens
  Light chain CDR3 for antibody 2719 (IGKV1-8)
QQYYSYPLT

SEQ ID NO: 5438 - protein, 19 aa, Homo sapiens
  Heavy chain CDR3 for antibody 2719 (IGHV1-18)
ARDHGYCSSTSCYRAWFDP

SEQ ID NO: 5439 - protein, 9 aa, Homo sapiens
  Light chain CDR3 for antibody 2720 (IGKV1-9)
QHLNSHPFT

SEQ ID NO: 5440 - protein, 17 aa, Homo sapiens
  Heavy chain CDR3 for antibody 2720 (IGHV3-33)
AREITRVRGDSYYGMDV

SEQ ID NO: 5441 - protein, 8 aa, Homo sapiens
  Light chain CDR3 for antibody 2721 (IGKV1-6)
LQDYNYFT

SEQ ID NO: 5442 - protein, 13 aa, Homo sapiens
  Heavy chain CDR3 for antibody 2721 (IGHV3-33)
ARWYYDILTGFDY

SEQ ID NO: 5443 - protein, 9 aa, Homo sapiens
  Light chain CDR3 for antibody 2722 (IGKV1-9)
HQLNSYPYT

SEQ ID NO: 5444 - protein, 15 aa, Homo sapiens
  Heavy chain CDR3 for antibody 2722 (IGHV1-46)
AREKYYGSGTYPFDS

SEQ ID NO: 5445 - protein, 9 aa, Homo sapiens
  Light chain CDR3 for antibody 2723 (IGKV1-9)
HQLNSYPYT

SEQ ID NO: 5446 - protein, 15 aa, Homo sapiens
  Heavy chain CDR3 for antibody 2723 (IGHV1-46)
AREKYHGSGSSPFAY

SEQ ID NO: 5447 - protein, 9 aa, Homo sapiens
  Light chain CDR3 for antibody 2724 (IGKV1-9)
QQLISYPYT

SEQ ID NO: 5448 - protein, 13 aa, Homo sapiens
  Heavy chain CDR3 for antibody 2724 (IGHV1-18)
AREGGSFYVSFDY

SEQ ID NO: 5449 - protein, 9 aa, Homo sapiens
  Light chain CDR3 for antibody 2725 (IGKV1-9)
QQLNSHPFT

SEQ ID NO: 5450 - protein, 17 aa, Homo sapiens
  Heavy chain CDR3 for antibody 2725 (IGHV3-33)
AREITMVRGDNYYGIDV

SEQ ID NO: 5451 - protein, 9 aa, Homo sapiens
  Light chain CDR3 for antibody 2726 (IGKV1-27)
QKYNSAPLT

SEQ ID NO: 5452 - protein, 18 aa, Homo sapiens
  Heavy chain CDR3 for antibody 2726 (IGHV3-33)
ARDRGIAAAGTYYYGMDV

SEQ ID NO: 5453 - protein, 9 aa, Homo sapiens
  Light chain CDR3 for antibody 2727 (IGKV6-21)
HQSSSLPYT

SEQ ID NO: 5454 - protein, 16 aa, Homo sapiens
  Heavy chain CDR3 for antibody 2727 (IGHV1-18)
AREGETMGRGVIAFDY

SEQ ID NO: 5455 - protein, 9 aa, Homo sapiens
  Light chain CDR3 for antibody 2728 (IGKV1-13)
QQANSFPRT

SEQ ID NO: 5456 - protein, 15 aa, Homo sapiens
  Heavy chain CDR3 for antibody 2728 (IGHV3-33)
ARDYSTYYYYYGMDV

SEQ ID NO: 5457 - protein, 9 aa, Homo sapiens
  Light chain CDR3 for antibody 2729 (IGKV3D-20)
QQYGSSPWT

SEQ ID NO: 5458 - protein, 16 aa, Homo sapiens
  Heavy chain CDR3 for antibody 2729 (IGHV3-66)
ARGDYDILTGLDSLDY

SEQ ID NO: 5459 - protein, 9 aa, Homo sapiens
  Light chain CDR3 for antibody 2730 (IGKV1-9)
QQLNSYPPT

SEQ ID NO: 5460 - protein, 10 aa, Homo sapiens
  Heavy chain CDR3 for antibody 2730 (IGHV3-20)
ARGRGWGFDY

SEQ ID NO: 5461 - protein, 9 aa, Homo sapiens
  Light chain CDR3 for antibody 2731 (IGKV1-9)
QQLNSYPFT

SEQ ID NO: 5462 - protein, 17 aa, Homo sapiens
  Heavy chain CDR3 for antibody 2731 (IGHV3-33)
AREINRVRGDNYYGMEV

SEQ ID NO: 5463 - protein, 9 aa, Homo sapiens
  Light chain CDR3 for antibody 2732 (IGKV1-9)
QHLNSHPFT

SEQ ID NO: 5464 - protein, 17 aa, Homo sapiens
  Heavy chain CDR3 for antibody 2732 (IGHV3-33)
ASEITMVRGDNSYGMDV

SEQ ID NO: 5465 - protein, 9 aa, Homo sapiens
  Light chain CDR3 for antibody 2733 (IGKV1-9)
HQLNSYPYT

SEQ ID NO: 5466 - protein, 15 aa, Homo sapiens
  Heavy chain CDR3 for antibody 2733 (IGHV1-46)
AREKYYGAGSYPFDY

SEQ ID NO: 5467 - protein, 9 aa, Homo sapiens
  Light chain CDR3 for antibody 2734 (IGKV1-9)
QQFNSHPFT

SEQ ID NO: 5468 - protein, 17 aa, Homo sapiens
  Heavy chain CDR3 for antibody 2734 (IGHV3-33)
AREITLIRGDNYYGMDV

SEQ ID NO: 5469 - protein, 9 aa, Homo sapiens
  Light chain CDR3 for antibody 2735 (IGKV1-6)
LQDYNYPWT

SEQ ID NO: 5470 - protein, 10 aa, Homo sapiens
  Heavy chain CDR3 for antibody 2735 (IGHV3-33)
ARESTDGMDV

SEQ ID NO: 5471 - protein, 9 aa, Homo sapiens
  Light chain CDR3 for antibody 2736 (IGKV1-9)
HQLISYPYT

SEQ ID NO: 5472 - protein, 15 aa, Homo sapiens
  Heavy chain CDR3 for antibody 2736 (IGHV1-46)
AREKSYGSGSSPFDY

SEQ ID NO: 5473 - protein, 9 aa, Homo sapiens
  Light chain CDR3 for antibody 2737 (IGKV1D-17)
LQHNSYPYT

SEQ ID NO: 5474 - protein, 10 aa, Homo sapiens
  Heavy chain CDR3 for antibody 2737 (IGHV3-33)
ARESAAGIDY

SEQ ID NO: 5475 - protein, 9 aa, Homo sapiens
  Light chain CDR3 for antibody 2738 (IGKV1-9)
QQLNSYPYT

SEQ ID NO: 5476 - protein, 15 aa, Homo sapiens
  Heavy chain CDR3 for antibody 2738 (IGHV1-46)
AREKCYGSGSYAFDS

SEQ ID NO: 5477 - protein, 9 aa, Homo sapiens
  Light chain CDR3 for antibody 2739 (IGKV1-9)
QQLNSHPFT

SEQ ID NO: 5478 - protein, 17 aa, Homo sapiens
  Heavy chain CDR3 for antibody 2739 (IGHV3-33)
AREIAMVRGDNYYGMDF

SEQ ID NO: 5479 - protein, 9 aa, Homo sapiens
  Light chain CDR3 for antibody 2740 (IGKV1D-17)
LQHDSYPYT

SEQ ID NO: 5480 - protein, 10 aa, Homo sapiens
  Heavy chain CDR3 for antibody 2740 (IGHV3-33)
AREATDGMDV

SEQ ID NO: 5481 - protein, 9 aa, Homo sapiens
  Light chain CDR3 for antibody 2741 (IGKV1D-17)
LQHNSYPYT

SEQ ID NO: 5482 - protein, 10 aa, Homo sapiens
  Heavy chain CDR3 for antibody 2741 (IGHV3-33)
ARDAVAGFDS

SEQ ID NO: 5483 - protein, 9 aa, Homo sapiens
  Light chain CDR3 for antibody 2742 (IGKV1D-17)
LQHNSYPYT

SEQ ID NO: 5484 - protein, 13 aa, Homo sapiens
  Heavy chain CDR3 for antibody 2742 (IGHV3-33)
ARVLRYFDPDFDY

SEQ ID NO: 5485 - protein, 9 aa, Homo sapiens
  Light chain CDR3 for antibody 2743 (IGKV1-9)
QQLNSYPLT

SEQ ID NO: 5486 - protein, 17 aa, Homo sapiens
  Heavy chain CDR3 for antibody 2743 (IGHV1-18)
ARGIAVAGPYYYYGMDV

SEQ ID NO: 5487 - protein, 9 aa, Homo sapiens
  Light chain CDR3 for antibody 2744 (IGKV1-9)
QQLNSYPFT

SEQ ID NO: 5488 - protein, 17 aa, Homo sapiens
  Heavy chain CDR3 for antibody 2744 (IGHV3-33)
ARESTKVRGDNYYGMDV

SEQ ID NO: 5489 - protein, 9 aa, Homo sapiens
  Light chain CDR3 for antibody 2745 (IGKV1D-17)
LQHNSYPYT

SEQ ID NO: 5490 - protein, 16 aa, Homo sapiens
  Heavy chain CDR3 for antibody 2745 (IGHV3-33)
ARDRDIVATGEYYFDY

SEQ ID NO: 5491 - protein, 9 aa, Homo sapiens
  Light chain CDR3 for antibody 2746 (IGKV6-21)
HQSSSLPYT

SEQ ID NO: 5492 - protein, 16 aa, Homo sapiens
  Heavy chain CDR3 for antibody 2746 (IGHV1-18)
SREGETMVRGVIAFDY

SEQ ID NO: 5493 - protein, 9 aa, Homo sapiens
  Light chain CDR3 for antibody 2747 (IGKV1-6)
LQDYNYPYT

SEQ ID NO: 5494 - protein, 14 aa, Homo sapiens
  Heavy chain CDR3 for antibody 2747 (IGHV3-23)
AKERAVAALNWFDP

SEQ ID NO: 5495 - protein, 9 aa, Homo sapiens
  Light chain CDR3 for antibody 2748 (IGKV1D-17)
QQLNSHPFT

SEQ ID NO: 5496 - protein, 17 aa, Homo sapiens
  Heavy chain CDR3 for antibody 2748 (IGHV3-33)
ARDITMVRGDNYYGMDV

SEQ ID NO: 5497 - protein, 9 aa, Homo sapiens
  Light chain CDR3 for antibody 2749 (IGKV1D-17)
LQHNSYPYT

SEQ ID NO: 5498 - protein, 10 aa, Homo sapiens
  Heavy chain CDR3 for antibody 2749 (IGHV3-33)
ARASTDGMAV

SEQ ID NO: 5499 - protein, 9 aa, Homo sapiens
  Light chain CDR3 for antibody 2750 (IGKV1-9)
HQLNSYPYT

SEQ ID NO: 5500 - protein, 15 aa, Homo sapiens
  Heavy chain CDR3 for antibody 2750 (IGHV1-46)
AREKYHGSGSYPMDD

SEQ ID NO: 5501 - protein, 9 aa, Homo sapiens
  Light chain CDR3 for antibody 2751 (IGKV1D-17)
QQYYSYPLT

SEQ ID NO: 5502 - protein, 13 aa, Homo sapiens
  Heavy chain CDR3 for antibody 2751 (IGHV3-33)
ARDWYYGSASPYY

SEQ ID NO: 5503 - protein, 9 aa, Homo sapiens
  Light chain CDR3 for antibody 2752 (IGKV3D-20)
QQYNSYPWT

SEQ ID NO: 5504 - protein, 20 aa, Homo sapiens
  Heavy chain CDR3 for antibody 2752 (IGHV3-11)
ARGADILTGYYNYYYYGMDV

SEQ ID NO: 5505 - protein, 9 aa, Homo sapiens
  Light chain CDR3 for antibody 2753 (IGKV1-27)
QQLNSYPYT

SEQ ID NO: 5506 - protein, 15 aa, Homo sapiens
  Heavy chain CDR3 for antibody 2753 (IGHV1-46)
AREKDDGSGSYPIDY

SEQ ID NO: 5507 - protein, 9 aa, Homo sapiens
  Light chain CDR3 for antibody 2754 (IGKV1-12)
QQANSFPWT

SEQ ID NO: 5508 - protein, 13 aa, Homo sapiens
  Heavy chain CDR3 for antibody 2754 (IGHV1-18)
ARDWYYGSGSPYY

SEQ ID NO: 5509 - protein, 9 aa, Homo sapiens
  Light chain CDR3 for antibody 2755 (IGKV1D-17)
LQHNSYPYT

SEQ ID NO: 5510 - protein, 16 aa, Homo sapiens
  Heavy chain CDR3 for antibody 2755 (IGHV3-33)
AMTTVTTDYYYYGMDV

SEQ ID NO: 5511 - protein, 9 aa, Homo sapiens
  Light chain CDR3 for antibody 2756 (IGKV1-9)
QQLNSYPFT

SEQ ID NO: 5512 - protein, 17 aa, Homo sapiens
  Heavy chain CDR3 for antibody 2756 (IGHV3-33)
AREITLVRGDNYCGMDV

SEQ ID NO: 5513 - protein, 9 aa, Homo sapiens
  Light chain CDR3 for antibody 2757 (IGKV1D-17)
LQHNSYPYT

SEQ ID NO: 5514 - protein, 14 aa, Homo sapiens
  Heavy chain CDR3 for antibody 2757 (IGHV3-23)
AKERAVAGLNWFDP

SEQ ID NO: 5515 - protein, 9 aa, Homo sapiens
  Light chain CDR3 for antibody 2758 (IGKV1D-17)
LQHNSYPYT

SEQ ID NO: 5516 - protein, 10 aa, Homo sapiens
  Heavy chain CDR3 for antibody 2758 (IGHV3-33)
TIESTDGIDV

SEQ ID NO: 5517 - protein, 8 aa, Homo sapiens
  Light chain CDR3 for antibody 2759 (IGKV1D-13)
QQFNNYPT

SEQ ID NO: 5518 - protein, 10 aa, Homo sapiens
  Heavy chain CDR3 for antibody 2759 (IGHV3-33)
ARESTDGMDV

SEQ ID NO: 5519 - protein, 9 aa, Homo sapiens
  Light chain CDR3 for antibody 2760 (IGKV1-9)
QQLNSHPFT

SEQ ID NO: 5520 - protein, 17 aa, Homo sapiens
  Heavy chain CDR3 for antibody 2760 (IGHV3-33)
ERESTVVRGDNYYGMDV

SEQ ID NO: 5521 - protein, 9 aa, Homo sapiens
  Light chain CDR3 for antibody 2761 (IGKV1-6)
LQDYNYPYT

SEQ ID NO: 5522 - protein, 10 aa, Homo sapiens
  Heavy chain CDR3 for antibody 2761 (IGHV3-33)
ARETVAGFDY

SEQ ID NO: 5523 - protein, 9 aa, Homo sapiens
  Light chain CDR3 for antibody 2762 (IGKV1-9)
QRLNSYPYT

SEQ ID NO: 5524 - protein, 13 aa, Homo sapiens
  Heavy chain CDR3 for antibody 2762 (IGHV3-33)
ARDYCGGDCYPDP

SEQ ID NO: 5525 - protein, 9 aa, Homo sapiens
  Light chain CDR3 for antibody 2763 (IGKV1-9)
QQLNSYPYT

SEQ ID NO: 5526 - protein, 18 aa, Homo sapiens
  Heavy chain CDR3 for antibody 2763 (IGHV3-15)
TTDHSGYDHYYYYYGMDV

SEQ ID NO: 5527 - protein, 9 aa, Homo sapiens
  Light chain CDR3 for antibody 2764 (IGKV1D-17)
LQHNSYPYT

SEQ ID NO: 5528 - protein, 13 aa, Homo sapiens
  Heavy chain CDR3 for antibody 2764 (IGHV3-33)
ARDWYYGSGSPYY

SEQ ID NO: 5529 - protein, 9 aa, Homo sapiens
  Light chain CDR3 for antibody 2765 (IGKV1D-17)
LQHNSYPYT

SEQ ID NO: 5530 - protein, 10 aa, Homo sapiens
  Heavy chain CDR3 for antibody 2765 (IGHV3-33)
TIESTYAMDL

SEQ ID NO: 5531 - protein, 9 aa, Homo sapiens
  Light chain CDR3 for antibody 2766 (IGKV6-21)
HQSSSLPYT

SEQ ID NO: 5532 - protein, 16 aa, Homo sapiens
  Heavy chain CDR3 for antibody 2766 (IGHV1-18)
SRERDTMVRGFIAFDY

SEQ ID NO: 5533 - protein, 9 aa, Homo sapiens
  Light chain CDR3 for antibody 2767 (IGKV1-9)
QQLNSYPFT

SEQ ID NO: 5534 - protein, 17 aa, Homo sapiens
  Heavy chain CDR3 for antibody 2767 (IGHV3-33)
AREITLVRVDNYYAMDV

SEQ ID NO: 5535 - protein, 9 aa, Homo sapiens
  Light chain CDR3 for antibody 2768 (IGKV3-15)
QQYNNWPRT

SEQ ID NO: 5536 - protein, 19 aa, Homo sapiens
  Heavy chain CDR3 for antibody 2768 (IGHV1-18)
ARDHGYCSSTSCYRAWFDP

SEQ ID NO: 5537 - protein, 9 aa, Homo sapiens
  Light chain CDR3 for antibody 2769 (IGKV3-15)
QQYNNWPLT

SEQ ID NO: 5538 - protein, 15 aa, Homo sapiens
  Heavy chain CDR3 for antibody 2769 (IGHV1-46)
AREKYYGSGSYPFDY

SEQ ID NO: 5539 - protein, 9 aa, Homo sapiens
  Light chain CDR3 for antibody 2770 (IGKV1-9)
QQLNSYPFT

SEQ ID NO: 5540 - protein, 17 aa, Homo sapiens
  Heavy chain CDR3 for antibody 2770 (IGHV3-33)
EREINMVRGDNYYGMDV

SEQ ID NO: 5541 - protein, 9 aa, Homo sapiens
  Light chain CDR3 for antibody 2771 (IGKV1-9)
QQFNSHPFT

SEQ ID NO: 5542 - protein, 19 aa, Homo sapiens
  Heavy chain CDR3 for antibody 2771 (IGHV3-11)
ARDHGYCSSTSCYRAWFDP

SEQ ID NO: 5543 - protein, 9 aa, Homo sapiens
  Light chain CDR3 for antibody 2772 (IGKV1-9)
QQLNSYPFT

SEQ ID NO: 5544 - protein, 17 aa, Homo sapiens
  Heavy chain CDR3 for antibody 2772 (IGHV3-33)
AREITMVRGYNYYGIDV

SEQ ID NO: 5545 - protein, 9 aa, Homo sapiens
  Light chain CDR3 for antibody 2773 (IGKV1-9)
QQLNSFPFT

SEQ ID NO: 5546 - protein, 17 aa, Homo sapiens
  Heavy chain CDR3 for antibody 2773 (IGHV3-74)
AREITMVRGDTYYGMEV

SEQ ID NO: 5547 - protein, 9 aa, Homo sapiens
  Light chain CDR3 for antibody 2774 (IGKV1D-17)
LQHNSYPYT

SEQ ID NO: 5548 - protein, 10 aa, Homo sapiens
  Heavy chain CDR3 for antibody 2774 (IGHV3-33)
ARDSSDGMDV

SEQ ID NO: 5549 - protein, 9 aa, Homo sapiens
  Light chain CDR3 for antibody 2775 (IGKV1-9)
QQLNSYPFT

SEQ ID NO: 5550 - protein, 9 aa, Homo sapiens
  Heavy chain CDR3 for antibody 2775 (IGHV4-31)
ARDSGYFDY

SEQ ID NO: 5551 - protein, 9 aa, Homo sapiens
  Light chain CDR3 for antibody 2776 (IGKV1D-17)
QQLNSYPPT

SEQ ID NO: 5552 - protein, 18 aa, Homo sapiens
  Heavy chain CDR3 for antibody 2776 (IGHV3-11)
ARDVMGRGVMDYYYGMDV

SEQ ID NO: 5553 - protein, 9 aa, Homo sapiens
  Light chain CDR3 for antibody 2777 (IGKV1-9)
HQLISYPYT

SEQ ID NO: 5554 - protein, 15 aa, Homo sapiens
  Heavy chain CDR3 for antibody 2777 (IGHV1-46)
AREKYYGSESYPFDY

SEQ ID NO: 5555 - protein, 9 aa, Homo sapiens
  Light chain CDR3 for antibody 2778 (IGKV1-9)
LQHNSYPWT

SEQ ID NO: 5556 - protein, 17 aa, Homo sapiens
  Heavy chain CDR3 for antibody 2778 (IGHV3-33)
ARESTLVRGDNYYGMDV

SEQ ID NO: 5557 - protein, 9 aa, Homo sapiens
  Light chain CDR3 for antibody 2779 (IGKV1-9)
QQLNSYPFT

SEQ ID NO: 5558 - protein, 17 aa, Homo sapiens
  Heavy chain CDR3 for antibody 2779 (IGHV3-33)
AREINMVRGDNYSGMDG

SEQ ID NO: 5559 - protein, 9 aa, Homo sapiens
  Light chain CDR3 for antibody 2780 (IGKV1-9)
QQLNSHPFT

SEQ ID NO: 5560 - protein, 17 aa, Homo sapiens
  Heavy chain CDR3 for antibody 2780 (IGHV3-33)
AREITMVRGDDYYGMGV

SEQ ID NO: 5561 - protein, 8 aa, Homo sapiens
  Light chain CDR3 for antibody 2781 (IGKV1-5)
QQYNSYWT

SEQ ID NO: 5562 - protein, 13 aa, Homo sapiens
  Heavy chain CDR3 for antibody 2781 (IGHV1-24)
ATTYSGYAYYFDY

SEQ ID NO: 5563 - protein, 9 aa, Homo sapiens
  Light chain CDR3 for antibody 2782 (IGKV1D-17)
LQHNSYPYT

SEQ ID NO: 5564 - protein, 10 aa, Homo sapiens
  Heavy chain CDR3 for antibody 2782 (IGHV3-33)
AIESVAGFDS

SEQ ID NO: 5565 - protein, 9 aa, Homo sapiens
  Light chain CDR3 for antibody 2783 (IGKV1-9)
QHLNSHPFT

SEQ ID NO: 5566 - protein, 17 aa, Homo sapiens
  Heavy chain CDR3 for antibody 2783 (IGHV3-66)
AREITMDRGDNYYGMDA

SEQ ID NO: 5567 - protein, 9 aa, Homo sapiens
  Light chain CDR3 for antibody 2784 (IGKV1-9)
QHLNSHPFT

SEQ ID NO: 5568 - protein, 17 aa, Homo sapiens
  Heavy chain CDR3 for antibody 2784 (IGHV3-33)
AREITMFRGDNYYGMDV

SEQ ID NO: 5569 - protein, 9 aa, Homo sapiens
  Light chain CDR3 for antibody 2785 (IGKV1-9)
HQLNSYPYT

SEQ ID NO: 5570 - protein, 15 aa, Homo sapiens
  Heavy chain CDR3 for antibody 2785 (IGHV1-46)
AREKYYVSESYPFDY

SEQ ID NO: 5571 - protein, 9 aa, Homo sapiens
  Light chain CDR3 for antibody 2786 (IGKV1D-17)
LQHNSYPWT

SEQ ID NO: 5572 - protein, 9 aa, Homo sapiens
  Heavy chain CDR3 for antibody 2786 (IGHV3-66)
AREGAGIDS

SEQ ID NO: 5573 - protein, 9 aa, Homo sapiens
  Light chain CDR3 for antibody 2787 (IGKV1D-16)
QQLNSYPYT

SEQ ID NO: 5574 - protein, 9 aa, Homo sapiens
  Heavy chain CDR3 for antibody 2787 (IGHV3-33)
AREGAGVDY

SEQ ID NO: 5575 - protein, 9 aa, Homo sapiens
  Light chain CDR3 for antibody 2788 (IGKV1D-17)
LQHNSYPYT

SEQ ID NO: 5576 - protein, 10 aa, Homo sapiens
  Heavy chain CDR3 for antibody 2788 (IGHV3-33)
AGETSDGMDV

SEQ ID NO: 5577 - protein, 9 aa, Homo sapiens
  Light chain CDR3 for antibody 2789 (IGKV1-9)
QQFNSYPFT

SEQ ID NO: 5578 - protein, 17 aa, Homo sapiens
  Heavy chain CDR3 for antibody 2789 (IGHV3-33)
AREINLARGDNYYGMDV

SEQ ID NO: 5579 - protein, 9 aa, Homo sapiens
  Light chain CDR3 for antibody 2790 (IGKV1D-17)
LQHNSYPYT

SEQ ID NO: 5580 - protein, 10 aa, Homo sapiens
  Heavy chain CDR3 for antibody 2790 (IGHV3-64)
ARATVAAFDY

SEQ ID NO: 5581 - protein, 9 aa, Homo sapiens
  Light chain CDR3 for antibody 2791 (IGKV1-9)
QQLISYPYT

SEQ ID NO: 5582 - protein, 17 aa, Homo sapiens
  Heavy chain CDR3 for antibody 2791 (IGHV3-33)
AREITMLRGDNYYGLDV

SEQ ID NO: 5583 - protein, 9 aa, Homo sapiens
  Light chain CDR3 for antibody 2792 (IGKV1D-17)
LQHNSHPFT

SEQ ID NO: 5584 - protein, 17 aa, Homo sapiens
  Heavy chain CDR3 for antibody 2792 (IGHV3-33)
AREITMVRGDNYYGLDV

SEQ ID NO: 5585 - protein, 8 aa, Homo sapiens
  Light chain CDR3 for antibody 2793 (IGKV1-9)
QQFNNYPT

SEQ ID NO: 5586 - protein, 17 aa, Homo sapiens
  Heavy chain CDR3 for antibody 2793 (IGHV3-33)
AREITMVRGDNYYGMDV

SEQ ID NO: 5587 - protein, 9 aa, Homo sapiens
  Light chain CDR3 for antibody 2794 (IGKV1-9)
QQLNSYPYT

SEQ ID NO: 5588 - protein, 15 aa, Homo sapiens
  Heavy chain CDR3 for antibody 2794 (IGHV1-46)
GGEKYYGSGSYPFDS

SEQ ID NO: 5589 - protein, 9 aa, Homo sapiens
  Light chain CDR3 for antibody 2795 (IGKV1-9)
QQLNSYPFT

SEQ ID NO: 5590 - protein, 17 aa, Homo sapiens
  Heavy chain CDR3 for antibody 2795 (IGHV3-33)
AREITLVRGDNYYGIAV

SEQ ID NO: 5591 - protein, 9 aa, Homo sapiens
  Light chain CDR3 for antibody 2796 (IGKV1D-17)
LQHNSYPYT

SEQ ID NO: 5592 - protein, 10 aa, Homo sapiens
  Heavy chain CDR3 for antibody 2796 (IGHV3-33)
AGGSTDGIDV

SEQ ID NO: 5593 - protein, 9 aa, Homo sapiens
  Light chain CDR3 for antibody 2797 (IGKV1-9)
QQYYSYPQT

SEQ ID NO: 5594 - protein, 5 aa, Homo sapiens
  Heavy chain CDR3 for antibody 2797 (IGHV4-39)
ASLDY

SEQ ID NO: 5595 - protein, 9 aa, Homo sapiens
  Light chain CDR3 for antibody 2798 (IGKV1-9)
QQLNSHPFT

SEQ ID NO: 5596 - protein, 17 aa, Homo sapiens
  Heavy chain CDR3 for antibody 2798 (IGHV3-33)
AREIAMVRGDNYDGMDV

SEQ ID NO: 5597 - protein, 9 aa, Homo sapiens
  Light chain CDR3 for antibody 2799 (IGKV6-21)
HQSSSLPWT

SEQ ID NO: 5598 - protein, 19 aa, Homo sapiens
  Heavy chain CDR3 for antibody 2799 (IGHV3-66)
ARDRGGSGWPDYYYYGMDV

SEQ ID NO: 5599 - protein, 9 aa, Homo sapiens
  Light chain CDR3 for antibody 2800 (IGKV1-9)
QQLNSYPYT

SEQ ID NO: 5600 - protein, 15 aa, Homo sapiens
  Heavy chain CDR3 for antibody 2800 (IGHV1-46)
AREKYYGSGSYPIDD

SEQ ID NO: 5601 - protein, 9 aa, Homo sapiens
  Light chain CDR3 for antibody 2801 (IGKV1-9)
QQLISYPYT

SEQ ID NO: 5602 - protein, 15 aa, Homo sapiens
  Heavy chain CDR3 for antibody 2801 (IGHV1-46)
SREKYYGSGSYPFNS

SEQ ID NO: 5603 - protein, 9 aa, Homo sapiens
  Light chain CDR3 for antibody 2802 (IGKV3-15)
QQYNNWPLT

SEQ ID NO: 5604 - protein, 9 aa, Homo sapiens
  Heavy chain CDR3 for antibody 2802 (IGHV4-31)
ARDSASFDY

SEQ ID NO: 5605 - protein, 9 aa, Homo sapiens
  Light chain CDR3 for antibody 2803 (IGKV1-9)
QQLISYPYT

SEQ ID NO: 5606 - protein, 15 aa, Homo sapiens
  Heavy chain CDR3 for antibody 2803 (IGHV1-46)
AREKYHGSGSYPIDY

SEQ ID NO: 5607 - protein, 9 aa, Homo sapiens
  Light chain CDR3 for antibody 2804 (IGKV1D-17)
LQHNSYPYT

SEQ ID NO: 5608 - protein, 10 aa, Homo sapiens
  Heavy chain CDR3 for antibody 2804 (IGHV3-33)
AIESTDAINV

SEQ ID NO: 5609 - protein, 9 aa, Homo sapiens
  Light chain CDR3 for antibody 2805 (IGKV6-21)
HQSSSLPYT

SEQ ID NO: 5610 - protein, 16 aa, Homo sapiens
  Heavy chain CDR3 for antibody 2805 (IGHV1-18)
AREEDTMVRGVNAFDY

SEQ ID NO: 5611 - protein, 9 aa, Homo sapiens
  Light chain CDR3 for antibody 2806 (IGKV1D-17)
QQLNSYPFT

SEQ ID NO: 5612 - protein, 16 aa, Homo sapiens
  Heavy chain CDR3 for antibody 2806 (IGHV3-23)
AKDSGSYHYYYYGMDV

SEQ ID NO: 5613 - protein, 9 aa, Homo sapiens
  Light chain CDR3 for antibody 2807 (IGKV1D-17)
LQHNSYPYT

SEQ ID NO: 5614 - protein, 9 aa, Homo sapiens
  Heavy chain CDR3 for antibody 2807 (IGHV3-33)
AREGAGIDY

SEQ ID NO: 5615 - protein, 9 aa, Homo sapiens
  Light chain CDR3 for antibody 2808 (IGKV1D-17)
QQLNSHPFT

SEQ ID NO: 5616 - protein, 17 aa, Homo sapiens
  Heavy chain CDR3 for antibody 2808 (IGHV3-30)
AREITMVRGDKYYGMDG

SEQ ID NO: 5617 - protein, 9 aa, Homo sapiens
  Light chain CDR3 for antibody 2809 (IGKV1-9)
QHLNSHPFT

SEQ ID NO: 5618 - protein, 9 aa, Homo sapiens
  Heavy chain CDR3 for antibody 2809 (IGHV3-33)
AREGAGVDY

SEQ ID NO: 5619 - protein, 9 aa, Homo sapiens
  Light chain CDR3 for antibody 2810 (IGKV1-9)
QQLNSYPFT

SEQ ID NO: 5620 - protein, 17 aa, Homo sapiens
  Heavy chain CDR3 for antibody 2810 (IGHV3-33)
VREITRARGDNYYGLDV

SEQ ID NO: 5621 - protein, 9 aa, Homo sapiens
  Light chain CDR3 for antibody 2811 (IGKV3-15)
QQYNNWPRT

SEQ ID NO: 5622 - protein, 13 aa, Homo sapiens
  Heavy chain CDR3 for antibody 2811 (IGHV3-66)
ARDDSSGWYYFDY

SEQ ID NO: 5623 - protein, 9 aa, Homo sapiens
  Light chain CDR3 for antibody 2812 (IGKV1D-17)
LQHNSYPYT

SEQ ID NO: 5624 - protein, 10 aa, Homo sapiens
  Heavy chain CDR3 for antibody 2812 (IGHV3-33)
ARAAVTGFDY

SEQ ID NO: 5625 - protein, 9 aa, Homo sapiens
  Light chain CDR3 for antibody 2813 (IGKV1-6)
LQDYNYPYT

SEQ ID NO: 5626 - protein, 15 aa, Homo sapiens
  Heavy chain CDR3 for antibody 2813 (IGHV4-59)
AGRSSHYYYYYGMDV

SEQ ID NO: 5627 - protein, 9 aa, Homo sapiens
  Light chain CDR3 for antibody 2814 (IGKV1-9)
QQLNGYPYT

SEQ ID NO: 5628 - protein, 10 aa, Homo sapiens
  Heavy chain CDR3 for antibody 2814 (IGHV3-33)
ARESTDGMDV

SEQ ID NO: 5629 - protein, 9 aa, Homo sapiens
  Light chain CDR3 for antibody 2815 (IGKV1-9)
QQLNSYPFT

SEQ ID NO: 5630 - protein, 17 aa, Homo sapiens
  Heavy chain CDR3 for antibody 2815 (IGHV3-30)
ARESKMVRGANYYAMDD

SEQ ID NO: 5631 - protein, 9 aa, Homo sapiens
  Light chain CDR3 for antibody 2816 (IGKV3-15)
QQYNNWPRT

SEQ ID NO: 5632 - protein, 16 aa, Homo sapiens
  Heavy chain CDR3 for antibody 2816 (IGHV3-33)
ARDRDIVATGEYSFDS

SEQ ID NO: 5633 - protein, 9 aa, Homo sapiens
  Light chain CDR3 for antibody 2817 (IGKV1-9)
QQFNSHPFT

SEQ ID NO: 5634 - protein, 10 aa, Homo sapiens
  Heavy chain CDR3 for antibody 2817 (IGHV3-33)
AREATDGMAV

SEQ ID NO: 5635 - protein, 9 aa, Homo sapiens
  Light chain CDR3 for antibody 2818 (IGKV1D-17)
LQHNSYPYT

SEQ ID NO: 5636 - protein, 17 aa, Homo sapiens
  Heavy chain CDR3 for antibody 2818 (IGHV3-33)
AREITMLRGDNYYGLDV

SEQ ID NO: 5637 - protein, 9 aa, Homo sapiens
  Light chain CDR3 for antibody 2819 (IGKV1-8)
QQYYSYPLT

SEQ ID NO: 5638 - protein, 14 aa, Homo sapiens
  Heavy chain CDR3 for antibody 2819 (IGHV3-23)
AKNRAVAGLNWFEP

SEQ ID NO: 5639 - protein, 9 aa, Homo sapiens
  Light chain CDR3 for antibody 2820 (IGKV1D-17)
LQHNSYPYT

SEQ ID NO: 5640 - protein, 14 aa, Homo sapiens
  Heavy chain CDR3 for antibody 2820 (IGHV3-23)
AKAIAVAGTWYFDL

SEQ ID NO: 5641 - protein, 9 aa, Homo sapiens
  Light chain CDR3 for antibody 2821 (IGKV1D-17)
LQHNSYPYT

SEQ ID NO: 5642 - protein, 15 aa, Homo sapiens
  Heavy chain CDR3 for antibody 2821 (IGHV1-46)
AREKSHGSGSSPFDS

SEQ ID NO: 5643 - protein, 9 aa, Homo sapiens
  Light chain CDR3 for antibody 2822 (IGKV1-9)
QQFNSYPFT

SEQ ID NO: 5644 - protein, 10 aa, Homo sapiens
  Heavy chain CDR3 for antibody 2822 (IGHV3-33)
ARGVWFGADY

SEQ ID NO: 5645 - protein, 9 aa, Homo sapiens
  Light chain CDR3 for antibody 2823 (IGKV1-9)
HQLNSYPYT

SEQ ID NO: 5646 - protein, 15 aa, Homo sapiens
  Heavy chain CDR3 for antibody 2823 (IGHV1-46)
AGEKYYGSGSSPFDY

SEQ ID NO: 5647 - protein, 9 aa, Homo sapiens
  Light chain CDR3 for antibody 2824 (IGKV1-9)
QQLNSYPYT

SEQ ID NO: 5648 - protein, 15 aa, Homo sapiens
  Heavy chain CDR3 for antibody 2824 (IGHV1-46)
SREKYYGSGTSPFDY

SEQ ID NO: 5649 - protein, 9 aa, Homo sapiens
  Light chain CDR3 for antibody 2825 (IGKV1-9)
QQLISYPYT

SEQ ID NO: 5650 - protein, 15 aa, Homo sapiens
  Heavy chain CDR3 for antibody 2825 (IGHV1-46)
AREKYYGSGSSPFES

SEQ ID NO: 5651 - protein, 9 aa, Homo sapiens
  Light chain CDR3 for antibody 2826 (IGKV1-6)
QKYNSAPLT

SEQ ID NO: 5652 - protein, 10 aa, Homo sapiens
  Heavy chain CDR3 for antibody 2826 (IGHV3-33)
ARESVAGFDY

SEQ ID NO: 5653 - protein, 9 aa, Homo sapiens
  Light chain CDR3 for antibody 2827 (IGKV1-9)
QHLNSHPFT

SEQ ID NO: 5654 - protein, 17 aa, Homo sapiens
  Heavy chain CDR3 for antibody 2827 (IGHV3-33)
AREIAVVRGDNYYGMDV

SEQ ID NO: 5655 - protein, 9 aa, Homo sapiens
  Light chain CDR3 for antibody 2828 (IGKV1-9)
QQLNSYPPT

SEQ ID NO: 5656 - protein, 16 aa, Homo sapiens
  Heavy chain CDR3 for antibody 2828 (IGHV1-18)
AMTTVTTDYYYYGMDV

SEQ ID NO: 5657 - protein, 9 aa, Homo sapiens
  Light chain CDR3 for antibody 2829 (IGKV1D-17)
LQHNSYPYT

SEQ ID NO: 5658 - protein, 10 aa, Homo sapiens
  Heavy chain CDR3 for antibody 2829 (IGHV3-30)
TRESTDAMDV

SEQ ID NO: 5659 - protein, 9 aa, Homo sapiens
  Light chain CDR3 for antibody 2830 (IGKV1D-17)
LQHNSYPYT

SEQ ID NO: 5660 - protein, 18 aa, Homo sapiens
  Heavy chain CDR3 for antibody 2830 (IGHV3-33)
ARYGDPERDYYYYYGMEV

SEQ ID NO: 5661 - protein, 9 aa, Homo sapiens
  Light chain CDR3 for antibody 2831 (IGKV1D-17)
QHLNSHPFT

SEQ ID NO: 5662 - protein, 12 aa, Homo sapiens
  Heavy chain CDR3 for antibody 2831 (IGHV4-39)
ARQGSYINWFDP

SEQ ID NO: 5663 - protein, 9 aa, Homo sapiens
  Light chain CDR3 for antibody 2832 (IGKV1D-17)
LQHNSYPWA

SEQ ID NO: 5664 - protein, 10 aa, Homo sapiens
  Heavy chain CDR3 for antibody 2832 (IGHV3-33)
AREATDGMAV

SEQ ID NO: 5665 - protein, 9 aa, Homo sapiens
  Light chain CDR3 for antibody 2833 (IGKV1-9)
QHLNSHPFT

SEQ ID NO: 5666 - protein, 17 aa, Homo sapiens
  Heavy chain CDR3 for antibody 2833 (IGHV3-33)
ARAITMVRGANYYGMDV

SEQ ID NO: 5667 - protein, 9 aa, Homo sapiens
  Light chain CDR3 for antibody 2834 (IGKV1D-17)
HQLNSYPYT

SEQ ID NO: 5668 - protein, 15 aa, Homo sapiens
  Heavy chain CDR3 for antibody 2834 (IGHV1-46)
AREKYYGSGRYPFAY

SEQ ID NO: 5669 - protein, 9 aa, Homo sapiens
  Light chain CDR3 for antibody 2835 (IGKV1-8)
QQYYSYPYT

SEQ ID NO: 5670 - protein, 14 aa, Homo sapiens
  Heavy chain CDR3 for antibody 2835 (IGHV3-23)
AKQEAVAGLNWIDP

SEQ ID NO: 5671 - protein, 9 aa, Homo sapiens
  Light chain CDR3 for antibody 2836 (IGKV1-9)
QQINSHPFT

SEQ ID NO: 5672 - protein, 17 aa, Homo sapiens
  Heavy chain CDR3 for antibody 2836 (IGHV3-33)
AREITMVRGDNYYGMNV

SEQ ID NO: 5673 - protein, 9 aa, Homo sapiens
  Light chain CDR3 for antibody 2837 (IGKV1-9)
HQLISYPYT

SEQ ID NO: 5674 - protein, 15 aa, Homo sapiens
  Heavy chain CDR3 for antibody 2837 (IGHV1-46)
AREKDYGSGSYAFDY

SEQ ID NO: 5675 - protein, 9 aa, Homo sapiens
  Light chain CDR3 for antibody 2838 (IGKV1-6)
LQDYNYLYT

SEQ ID NO: 5676 - protein, 17 aa, Homo sapiens
  Heavy chain CDR3 for antibody 2838 (IGHV4-39)
ARKYYDILTGTPLAFDI

SEQ ID NO: 5677 - protein, 9 aa, Homo sapiens
  Light chain CDR3 for antibody 2839 (IGKV1-6)
LQDYNYPWT

SEQ ID NO: 5678 - protein, 17 aa, Homo sapiens
  Heavy chain CDR3 for antibody 2839 (IGHV3-33)
AREGPYSSSWYGDWFEP

SEQ ID NO: 5679 - protein, 9 aa, Homo sapiens
  Light chain CDR3 for antibody 2840 (IGKV6-21)
HQSSSLPYT

SEQ ID NO: 5680 - protein, 16 aa, Homo sapiens
  Heavy chain CDR3 for antibody 2840 (IGHV1-18)
SREGYTMVPGVIAFDY

SEQ ID NO: 5681 - protein, 9 aa, Homo sapiens
  Light chain CDR3 for antibody 2841 (IGKV1-9)
QQLNSYPYT

SEQ ID NO: 5682 - protein, 15 aa, Homo sapiens
  Heavy chain CDR3 for antibody 2841 (IGHV1-46)
AREKYYGSGSYPYDS

SEQ ID NO: 5683 - protein, 9 aa, Homo sapiens
  Light chain CDR3 for antibody 2842 (IGKV1-9)
QQLNSYPYT

SEQ ID NO: 5684 - protein, 15 aa, Homo sapiens
  Heavy chain CDR3 for antibody 2842 (IGHV1-46)
AREKYYGSATYAFDY

SEQ ID NO: 5685 - protein, 9 aa, Homo sapiens
  Light chain CDR3 for antibody 2843 (IGKV1D-17)
LQHDSYPYT

SEQ ID NO: 5686 - protein, 10 aa, Homo sapiens
  Heavy chain CDR3 for antibody 2843 (IGHV3-33)
ARASTDAMDD

SEQ ID NO: 5687 - protein, 9 aa, Homo sapiens
  Light chain CDR3 for antibody 2844 (IGKV1-9)
QHLNSHPFT

SEQ ID NO: 5688 - protein, 17 aa, Homo sapiens
  Heavy chain CDR3 for antibody 2844 (IGHV3-66)
AREITMARGDNSYGMAV

SEQ ID NO: 5689 - protein, 9 aa, Homo sapiens
  Light chain CDR3 for antibody 2845 (IGKV1-9)
QQLNSYPFT

SEQ ID NO: 5690 - protein, 16 aa, Homo sapiens
  Heavy chain CDR3 for antibody 2845 (IGHV3-33)
ARDRDIVATGEYYFDY

SEQ ID NO: 5691 - protein, 9 aa, Homo sapiens
  Light chain CDR3 for antibody 2846 (IGKV6-21)
HQSSSLPYT

SEQ ID NO: 5692 - protein, 18 aa, Homo sapiens
  Heavy chain CDR3 for antibody 2846 (IGHV1-18)
AREGETMVRGDNYYGMDV

SEQ ID NO: 5693 - protein, 9 aa, Homo sapiens
  Light chain CDR3 for antibody 2847 (IGKV1D-17)
LQHNSYPYT

SEQ ID NO: 5694 - protein, 10 aa, Homo sapiens
  Heavy chain CDR3 for antibody 2847 (IGHV3-33)
ARASPDGIDA

SEQ ID NO: 5695 - protein, 9 aa, Homo sapiens
  Light chain CDR3 for antibody 2848 (IGKV1-9)
QQLNSYPFT

SEQ ID NO: 5696 - protein, 17 aa, Homo sapiens
  Heavy chain CDR3 for antibody 2848 (IGHV3-30)
AKKITMVRGDNYYAIDV

SEQ ID NO: 5697 - protein, 9 aa, Homo sapiens
  Light chain CDR3 for antibody 2849 (IGKV1-9)
HQLISYPYT

SEQ ID NO: 5698 - protein, 15 aa, Homo sapiens
  Heavy chain CDR3 for antibody 2849 (IGHV1-46)
ARKKYYGSGTYPFDY

SEQ ID NO: 5699 - protein, 9 aa, Homo sapiens
  Light chain CDR3 for antibody 2850 (IGKV1-9)
QQLNSYPFT

SEQ ID NO: 5700 - protein, 17 aa, Homo sapiens
  Heavy chain CDR3 for antibody 2850 (IGHV3-33)
AREIAVVRRENYYGMDV

SEQ ID NO: 5701 - protein, 9 aa, Homo sapiens
  Light chain CDR3 for antibody 2851 (IGKV1D-17)
LQHNSYPYT

SEQ ID NO: 5702 - protein, 10 aa, Homo sapiens
  Heavy chain CDR3 for antibody 2851 (IGHV3-33)
AREAPDAMAV

SEQ ID NO: 5703 - protein, 9 aa, Homo sapiens
  Light chain CDR3 for antibody 2852 (IGKV1-6)
QKYNSAPLT

SEQ ID NO: 5704 - protein, 13 aa, Homo sapiens
  Heavy chain CDR3 for antibody 2852 (IGHV3-66)
ARDWYYGSASTYY

SEQ ID NO: 5705 - protein, 9 aa, Homo sapiens
  Light chain CDR3 for antibody 2853 (IGKV1-9)
QQLNSYPFT

SEQ ID NO: 5706 - protein, 17 aa, Homo sapiens
  Heavy chain CDR3 for antibody 2853 (IGHV3-33)
AREITVVRVDNYYGMAV

SEQ ID NO: 5707 - protein, 9 aa, Homo sapiens
  Light chain CDR3 for antibody 2854 (IGKV1-9)
QQLNSHPFT

SEQ ID NO: 5708 - protein, 17 aa, Homo sapiens
  Heavy chain CDR3 for antibody 2854 (IGHV3-33)
AKEMTMARGDNYYGMDV

SEQ ID NO: 5709 - protein, 9 aa, Homo sapiens
  Light chain CDR3 for antibody 2855 (IGKV1D-17)
LQHNSYPYT

SEQ ID NO: 5710 - protein, 9 aa, Homo sapiens
  Heavy chain CDR3 for antibody 2855 (IGHV3-33)
AREGDYLDY

SEQ ID NO: 5711 - protein, 9 aa, Homo sapiens
  Light chain CDR3 for antibody 2856 (IGKV1-9)
QQLNSYPFT

SEQ ID NO: 5712 - protein, 14 aa, Homo sapiens
  Heavy chain CDR3 for antibody 2856 (IGHV3-23)
AKERAVAGLNWFDP

SEQ ID NO: 5713 - protein, 9 aa, Homo sapiens
  Light chain CDR3 for antibody 2857 (IGKV1D-17)
QQLNSYPFT

SEQ ID NO: 5714 - protein, 18 aa, Homo sapiens
  Heavy chain CDR3 for antibody 2857 (IGHV3-11)
ASDRGIAAAGTYYYGMDV

SEQ ID NO: 5715 - protein, 9 aa, Homo sapiens
  Light chain CDR3 for antibody 2858 (IGKV1D-17)
LQLNSHPFT

SEQ ID NO: 5716 - protein, 17 aa, Homo sapiens
  Heavy chain CDR3 for antibody 2858 (IGHV3-33)
AREITMVRGDNYYCMDV

SEQ ID NO: 5717 - protein, 9 aa, Homo sapiens
  Light chain CDR3 for antibody 2859 (IGKV1-9)
QQLNSYPYT

SEQ ID NO: 5718 - protein, 15 aa, Homo sapiens
  Heavy chain CDR3 for antibody 2859 (IGHV1-46)
ARQKYYGSESYPFDS

SEQ ID NO: 5719 - protein, 9 aa, Homo sapiens
  Light chain CDR3 for antibody 2860 (IGKV1-9)
QQLNSYPFT

SEQ ID NO: 5720 - protein, 17 aa, Homo sapiens
  Heavy chain CDR3 for antibody 2860 (IGHV3-33)
ASESTRERGDNYYGMDD

SEQ ID NO: 5721 - protein, 9 aa, Homo sapiens
  Light chain CDR3 for antibody 2861 (IGKV1-9)
QQLNSYPFT

SEQ ID NO: 5722 - protein, 17 aa, Homo sapiens
  Heavy chain CDR3 for antibody 2861 (IGHV3-33)
AREVTVIRGDNYYGMDV

SEQ ID NO: 5723 - protein, 9 aa, Homo sapiens
  Light chain CDR3 for antibody 2862 (IGKV1-9)
QQLNSYPYT

SEQ ID NO: 5724 - protein, 15 aa, Homo sapiens
  Heavy chain CDR3 for antibody 2862 (IGHV1-46)
EREKYHGSGSYPFDY

SEQ ID NO: 5725 - protein, 9 aa, Homo sapiens
  Light chain CDR3 for antibody 2863 (IGKV1D-17)
LQHDSYPYT

SEQ ID NO: 5726 - protein, 10 aa, Homo sapiens
  Heavy chain CDR3 for antibody 2863 (IGHV3-33)
AIESTYAMDA

SEQ ID NO: 5727 - protein, 9 aa, Homo sapiens
  Light chain CDR3 for antibody 2864 (IGKV1D-16)
QQYNSYPYT

SEQ ID NO: 5728 - protein, 13 aa, Homo sapiens
  Heavy chain CDR3 for antibody 2864 (IGHV3-33)
ARRDSSSWYEFDY

SEQ ID NO: 5729 - protein, 9 aa, Homo sapiens
  Light chain CDR3 for antibody 2865 (IGKV1-9)
HQLNSYPYT

SEQ ID NO: 5730 - protein, 15 aa, Homo sapiens
  Heavy chain CDR3 for antibody 2865 (IGHV1-46)
AREKYHGSGNYPFDY

SEQ ID NO: 5731 - protein, 9 aa, Homo sapiens
  Light chain CDR3 for antibody 2866 (IGKV1-9)
QQFNSYPFT

SEQ ID NO: 5732 - protein, 17 aa, Homo sapiens
  Heavy chain CDR3 for antibody 2866 (IGHV3-33)
GRESTMVRGENAYGMDV

SEQ ID NO: 5733 - protein, 9 aa, Homo sapiens
  Light chain CDR3 for antibody 2867 (IGKV1-9)
QHLNSHPFT

SEQ ID NO: 5734 - protein, 17 aa, Homo sapiens
  Heavy chain CDR3 for antibody 2867 (IGHV3-33)
AREITRIRGDNYYGMDA

SEQ ID NO: 5735 - protein, 9 aa, Homo sapiens
  Light chain CDR3 for antibody 2868 (IGKV1-9)
HQLNSYPYT

SEQ ID NO: 5736 - protein, 10 aa, Homo sapiens
  Heavy chain CDR3 for antibody 2868 (IGHV3-33)
ASESTDGMEA

SEQ ID NO: 5737 - protein, 9 aa, Homo sapiens
  Light chain CDR3 for antibody 2869 (IGKV1-9)
QQLNGYPYT

SEQ ID NO: 5738 - protein, 15 aa, Homo sapiens
  Heavy chain CDR3 for antibody 2869 (IGHV1-46)
AREKYYGSGSYAFDD

SEQ ID NO: 5739 - protein, 9 aa, Homo sapiens
  Light chain CDR3 for antibody 2870 (IGKV6-21)
HQSSSLPYT

SEQ ID NO: 5740 - protein, 16 aa, Homo sapiens
  Heavy chain CDR3 for antibody 2870 (IGHV1-18)
AREGETRGRGVIAFDY

SEQ ID NO: 5741 - protein, 9 aa, Homo sapiens
  Light chain CDR3 for antibody 2871 (IGKV1-9)
QQLISYPYT

SEQ ID NO: 5742 - protein, 15 aa, Homo sapiens
  Heavy chain CDR3 for antibody 2871 (IGHV1-46)
AIEKYYGSCSYPFYS

SEQ ID NO: 5743 - protein, 9 aa, Homo sapiens
  Light chain CDR3 for antibody 2872 (IGKV6-21)
HQSSSLPYT

SEQ ID NO: 5744 - protein, 16 aa, Homo sapiens
  Heavy chain CDR3 for antibody 2872 (IGHV1-18)
AREGETMVRGFIAFHY

SEQ ID NO: 5745 - protein, 9 aa, Homo sapiens
  Light chain CDR3 for antibody 2873 (IGKV1-9)
QQLNSYPFT

SEQ ID NO: 5746 - protein, 17 aa, Homo sapiens
  Heavy chain CDR3 for antibody 2873 (IGHV4-59)
ARTLFWFGELGGWYFDL

SEQ ID NO: 5747 - protein, 9 aa, Homo sapiens
  Light chain CDR3 for antibody 2874 (IGKV1-9)
QQLNSHPFT

SEQ ID NO: 5748 - protein, 17 aa, Homo sapiens
  Heavy chain CDR3 for antibody 2874 (IGHV3-33)
AREITRVRGDNYYGMDD

SEQ ID NO: 5749 - protein, 9 aa, Homo sapiens
  Light chain CDR3 for antibody 2875 (IGKV1-9)
QQLNSYPYT

SEQ ID NO: 5750 - protein, 15 aa, Homo sapiens
  Heavy chain CDR3 for antibody 2875 (IGHV1-46)
AREKYYGSDTSPFDY

SEQ ID NO: 5751 - protein, 9 aa, Homo sapiens
  Light chain CDR3 for antibody 2876 (IGKV1-9)
QQLNSYPFT

SEQ ID NO: 5752 - protein, 17 aa, Homo sapiens
  Heavy chain CDR3 for antibody 2876 (IGHV3-33)
ARQITLVRGDNYYGMNV

SEQ ID NO: 5753 - protein, 9 aa, Homo sapiens
  Light chain CDR3 for antibody 2877 (IGKV1-9)
QQLNSYPYT

SEQ ID NO: 5754 - protein, 15 aa, Homo sapiens
  Heavy chain CDR3 for antibody 2877 (IGHV1-46)
AREKCYGAGSYPFDY

SEQ ID NO: 5755 - protein, 9 aa, Homo sapiens
  Light chain CDR3 for antibody 2878 (IGKV1-9)
HQLISYPYT

SEQ ID NO: 5756 - protein, 15 aa, Homo sapiens
  Heavy chain CDR3 for antibody 2878 (IGHV1-46)
AREKCYGSGSYPFDY

SEQ ID NO: 5757 - protein, 9 aa, Homo sapiens
  Light chain CDR3 for antibody 2879 (IGKV1D-17)
LQHNSYPYT

SEQ ID NO: 5758 - protein, 10 aa, Homo sapiens
  Heavy chain CDR3 for antibody 2879 (IGHV3-33)
ARKSTDAIDA

SEQ ID NO: 5759 - protein, 9 aa, Homo sapiens
  Light chain CDR3 for antibody 2880 (IGKV1-9)
HQLNSYPYT

SEQ ID NO: 5760 - protein, 15 aa, Homo sapiens
  Heavy chain CDR3 for antibody 2880 (IGHV1-46)
SREKSHGSGTSPFDY

SEQ ID NO: 5761 - protein, 9 aa, Homo sapiens
  Light chain CDR3 for antibody 2881 (IGKV1-9)
QQLNSYPFT

SEQ ID NO: 5762 - protein, 17 aa, Homo sapiens
  Heavy chain CDR3 for antibody 2881 (IGHV3-33)
AREITMARGDNSYGMAA

SEQ ID NO: 5763 - protein, 9 aa, Homo sapiens
  Light chain CDR3 for antibody 2882 (IGKV1-9)
HQLNSYPYT

SEQ ID NO: 5764 - protein, 15 aa, Homo sapiens
  Heavy chain CDR3 for antibody 2882 (IGHV1-46)
AREKSYVSGSYPFAY

SEQ ID NO: 5765 - protein, 9 aa, Homo sapiens
  Light chain CDR3 for antibody 2883 (IGKV3D-20)
QQYGSSPWT

SEQ ID NO: 5766 - protein, 19 aa, Homo sapiens
  Heavy chain CDR3 for antibody 2883 (IGHV1-18)
ASDHGYWSSPSCYRAWFEP

SEQ ID NO: 5767 - protein, 9 aa, Homo sapiens
  Light chain CDR3 for antibody 2884 (IGKV1-9)
HQLNSYPYT

SEQ ID NO: 5768 - protein, 15 aa, Homo sapiens
  Heavy chain CDR3 for antibody 2884 (IGHV1-46)
GREKYYGSGSSPFDY

SEQ ID NO: 5769 - protein, 9 aa, Homo sapiens
  Light chain CDR3 for antibody 2885 (IGKV1-9)
HQLNSYPYT

SEQ ID NO: 5770 - protein, 15 aa, Homo sapiens
  Heavy chain CDR3 for antibody 2885 (IGHV1-46)
AREKYHVSGSYPFDY

SEQ ID NO: 5771 - protein, 9 aa, Homo sapiens
  Light chain CDR3 for antibody 2886 (IGKV1D-17)
LQHNSYPYT

SEQ ID NO: 5772 - protein, 15 aa, Homo sapiens
  Heavy chain CDR3 for antibody 2886 (IGHV1-46)
AREKYYGSGSYPFEY

SEQ ID NO: 5773 - protein, 9 aa, Homo sapiens
  Light chain CDR3 for antibody 2887 (IGKV1-9)
QHLTSHPFT

SEQ ID NO: 5774 - protein, 17 aa, Homo sapiens
  Heavy chain CDR3 for antibody 2887 (IGHV3-33)
AREITMVRGDDYYGMDV

SEQ ID NO: 5775 - protein, 9 aa, Homo sapiens
  Light chain CDR3 for antibody 2888 (IGKV1-9)
QQLNSYPYT

SEQ ID NO: 5776 - protein, 15 aa, Homo sapiens
  Heavy chain CDR3 for antibody 2888 (IGHV1-46)
AREKYYGSECYPIDY

SEQ ID NO: 5777 - protein, 9 aa, Homo sapiens
  Light chain CDR3 for antibody 2889 (IGKV1-9)
QQLNSHPFT

SEQ ID NO: 5778 - protein, 14 aa, Homo sapiens
  Heavy chain CDR3 for antibody 2889 (IGHV3-23)
AKAIAVAGTWYFDL

SEQ ID NO: 5779 - protein, 9 aa, Homo sapiens
  Light chain CDR3 for antibody 2890 (IGKV6-21)
HQSSSLPYT

SEQ ID NO: 5780 - protein, 16 aa, Homo sapiens
  Heavy chain CDR3 for antibody 2890 (IGHV1-18)
AREGDTMGRGVNALDY

SEQ ID NO: 5781 - protein, 9 aa, Homo sapiens
  Light chain CDR3 for antibody 2891 (IGKV1-9)
QQLNSYPFT

SEQ ID NO: 5782 - protein, 17 aa, Homo sapiens
  Heavy chain CDR3 for antibody 2891 (IGHV3-33)
AREITMVRVYNYYGLDV

SEQ ID NO: 5783 - protein, 9 aa, Homo sapiens
  Light chain CDR3 for antibody 2892 (IGKV1D-17)
LQHNSYPYT

SEQ ID NO: 5784 - protein, 10 aa, Homo sapiens
  Heavy chain CDR3 for antibody 2892 (IGHV3-33)
ARESSYGMDV

SEQ ID NO: 5785 - protein, 9 aa, Homo sapiens
  Light chain CDR3 for antibody 2893 (IGKV1D-17)
LQHNSYPYT

SEQ ID NO: 5786 - protein, 10 aa, Homo sapiens
  Heavy chain CDR3 for antibody 2893 (IGHV3-33)
ARDSPDGMEG

SEQ ID NO: 5787 - protein, 9 aa, Homo sapiens
  Light chain CDR3 for antibody 2894 (IGKV1-9)
QQLNSYPFT

SEQ ID NO: 5788 - protein, 17 aa, Homo sapiens
  Heavy chain CDR3 for antibody 2894 (IGHV3-33)
ARESHMVRGDNYYGMEV

SEQ ID NO: 5789 - protein, 9 aa, Homo sapiens
  Light chain CDR3 for antibody 2895 (IGKV1-9)
QQLNSYPYT

SEQ ID NO: 5790 - protein, 15 aa, Homo sapiens
  Heavy chain CDR3 for antibody 2895 (IGHV1-46)
AREKYYGAGSYPIEY

SEQ ID NO: 5791 - protein, 9 aa, Homo sapiens
  Light chain CDR3 for antibody 2896 (IGKV1-9)
QQLISYPYT

SEQ ID NO: 5792 - protein, 16 aa, Homo sapiens
  Heavy chain CDR3 for antibody 2896 (IGHV1-18)
AREGKTMGRGVIAFDY

SEQ ID NO: 5793 - protein, 9 aa, Homo sapiens
  Light chain CDR3 for antibody 2897 (IGKV1D-17)
LQHNSYPYT

SEQ ID NO: 5794 - protein, 10 aa, Homo sapiens
  Heavy chain CDR3 for antibody 2897 (IGHV3-33)
ARESPYGMAV

SEQ ID NO: 5795 - protein, 10 aa, Homo sapiens
  Light chain CDR3 for antibody 2898 (IGKV2D-28)
MQAPQTPPYT

SEQ ID NO: 5796 - protein, 15 aa, Homo sapiens
  Heavy chain CDR3 for antibody 2898 (IGHV1-46)
AREKYYGSGSYPFDY

SEQ ID NO: 5797 - protein, 9 aa, Homo sapiens
  Light chain CDR3 for antibody 2899 (IGKV1-9)
QQLNSYPFT

SEQ ID NO: 5798 - protein, 17 aa, Homo sapiens
  Heavy chain CDR3 for antibody 2899 (IGHV3-33)
GREITMVQGDNYYGLDV

SEQ ID NO: 5799 - protein, 9 aa, Homo sapiens
  Light chain CDR3 for antibody 2900 (IGKV1D-17)
LQHNSYPYT

SEQ ID NO: 5800 - protein, 10 aa, Homo sapiens
  Heavy chain CDR3 for antibody 2900 (IGHV3-33)
ARESTSGIDA

SEQ ID NO: 5801 - protein, 9 aa, Homo sapiens
  Light chain CDR3 for antibody 2901 (IGKV6-21)
HQSSSLPYT

SEQ ID NO: 5802 - protein, 16 aa, Homo sapiens
  Heavy chain CDR3 for antibody 2901 (IGHV1-18)
AREGETMVRGVIAFAS

SEQ ID NO: 5803 - protein, 9 aa, Homo sapiens
  Light chain CDR3 for antibody 2902 (IGKV1-6)
QKYNSAPLT

SEQ ID NO: 5804 - protein, 15 aa, Homo sapiens
  Heavy chain CDR3 for antibody 2902 (IGHV1-46)
AREKYYGSGSYPFDY

SEQ ID NO: 5805 - protein, 9 aa, Homo sapiens
  Light chain CDR3 for antibody 2903 (IGKV1-12)
QQANSFPRT

SEQ ID NO: 5806 - protein, 10 aa, Homo sapiens
  Heavy chain CDR3 for antibody 2903 (IGHV3-33)
ARESTDGMDV

SEQ ID NO: 5807 - protein, 9 aa, Homo sapiens
  Light chain CDR3 for antibody 2904 (IGKV1-9)
QQLISYPYT

SEQ ID NO: 5808 - protein, 15 aa, Homo sapiens
  Heavy chain CDR3 for antibody 2904 (IGHV1-46)
AREKYYGAGRYPFDS

SEQ ID NO: 5809 - protein, 9 aa, Homo sapiens
  Light chain CDR3 for antibody 2905 (IGKV1D-17)
LQHNSYPYT

SEQ ID NO: 5810 - protein, 9 aa, Homo sapiens
  Heavy chain CDR3 for antibody 2905 (IGHV3-66)
AREGAGIAY

SEQ ID NO: 5811 - protein, 9 aa, Homo sapiens
  Light chain CDR3 for antibody 2906 (IGKV1-27)
QKYNSAPLT

SEQ ID NO: 5812 - protein, 13 aa, Homo sapiens
  Heavy chain CDR3 for antibody 2906 (IGHV3-33)
ARDWCYGAGSTYY

SEQ ID NO: 5813 - protein, 9 aa, Homo sapiens
  Light chain CDR3 for antibody 2907 (IGKV1D-17)
LQHNSYPYT

SEQ ID NO: 5814 - protein, 18 aa, Homo sapiens
  Heavy chain CDR3 for antibody 2907 (IGHV3-11)
ARDRGIAAAGTYYYGMDV

SEQ ID NO: 5815 - protein, 9 aa, Homo sapiens
  Light chain CDR3 for antibody 2908 (IGKV1-9)
QQLNSYPFT

SEQ ID NO: 5816 - protein, 17 aa, Homo sapiens
  Heavy chain CDR3 for antibody 2908 (IGHV3-30)
AREITMGRGANYYAMAV

SEQ ID NO: 5817 - protein, 9 aa, Homo sapiens
  Light chain CDR3 for antibody 2909 (IGKV1-9)
HQLNSYPYT

SEQ ID NO: 5818 - protein, 15 aa, Homo sapiens
  Heavy chain CDR3 for antibody 2909 (IGHV1-46)
AREKSHGSGSSPFAS

SEQ ID NO: 5819 - protein, 9 aa, Homo sapiens
  Light chain CDR3 for antibody 2910 (IGKV1D-17)
LQHNSYPYT

SEQ ID NO: 5820 - protein, 10 aa, Homo sapiens
  Heavy chain CDR3 for antibody 2910 (IGHV3-33)
ARQSTNGIDV

SEQ ID NO: 5821 - protein, 9 aa, Homo sapiens
  Light chain CDR3 for antibody 2911 (IGKV6-21)
HQSSSLPYT

SEQ ID NO: 5822 - protein, 9 aa, Homo sapiens
  Heavy chain CDR3 for antibody 2911 (IGHV3-66)
AREGAGIDY

SEQ ID NO: 5823 - protein, 9 aa, Homo sapiens
  Light chain CDR3 for antibody 2912 (IGKV1D-17)
LQHNSYPYT

SEQ ID NO: 5824 - protein, 10 aa, Homo sapiens
  Heavy chain CDR3 for antibody 2912 (IGHV3-33)
ASESSDAMDV

SEQ ID NO: 5825 - protein, 9 aa, Homo sapiens
  Light chain CDR3 for antibody 2913 (IGKV1-9)
QQLNSYPFT

SEQ ID NO: 5826 - protein, 17 aa, Homo sapiens
  Heavy chain CDR3 for antibody 2913 (IGHV3-33)
AREITLLRGDNYYGMDF

SEQ ID NO: 5827 - protein, 9 aa, Homo sapiens
  Light chain CDR3 for antibody 2914 (IGKV1-5)
QQYNSYSRT

SEQ ID NO: 5828 - protein, 17 aa, Homo sapiens
  Heavy chain CDR3 for antibody 2914 (IGHV4-59)
ARTLFWFGESGGSSFDL

SEQ ID NO: 5829 - protein, 9 aa, Homo sapiens
  Light chain CDR3 for antibody 2915 (IGKV2D-30)
MQGTHWPIT

SEQ ID NO: 5830 - protein, 10 aa, Homo sapiens
  Heavy chain CDR3 for antibody 2915 (IGHV4-59)
AREAVAGFDY

SEQ ID NO: 5831 - protein, 9 aa, Homo sapiens
  Light chain CDR3 for antibody 2916 (IGKV1-9)
QQLNSYPFT

SEQ ID NO: 5832 - protein, 17 aa, Homo sapiens
  Heavy chain CDR3 for antibody 2916 (IGHV3-33)
ARESTMVRGDTYYGLDV

SEQ ID NO: 5833 - protein, 9 aa, Homo sapiens
  Light chain CDR3 for antibody 2917 (IGKV1-9)
QQLNSYPYT

SEQ ID NO: 5834 - protein, 10 aa, Homo sapiens
  Heavy chain CDR3 for antibody 2917 (IGHV3-33)
ARESTYAMDA

SEQ ID NO: 5835 - protein, 9 aa, Homo sapiens
  Light chain CDR3 for antibody 2918 (IGKV6-21)
HQSSSLPYT

SEQ ID NO: 5836 - protein, 16 aa, Homo sapiens
  Heavy chain CDR3 for antibody 2918 (IGHV1-18)
AREGDAMGRRVIALDY

SEQ ID NO: 5837 - protein, 9 aa, Homo sapiens
  Light chain CDR3 for antibody 2919 (IGKV1D-17)
QQLNSYPFT

SEQ ID NO: 5838 - protein, 13 aa, Homo sapiens
  Heavy chain CDR3 for antibody 2919 (IGHV1-24)
ATHYDILTGYFDY

SEQ ID NO: 5839 - protein, 9 aa, Homo sapiens
  Light chain CDR3 for antibody 2920 (IGKV1-9)
QHLNSHPFT

SEQ ID NO: 5840 - protein, 17 aa, Homo sapiens
  Heavy chain CDR3 for antibody 2920 (IGHV3-33)
AREITRVRGDNYYGLAV

SEQ ID NO: 5841 - protein, 9 aa, Homo sapiens
  Light chain CDR3 for antibody 2921 (IGKV1-9)
QQLNSYPFT

SEQ ID NO: 5842 - protein, 17 aa, Homo sapiens
  Heavy chain CDR3 for antibody 2921 (IGHV3-33)
AREITMVRVDNYYGIDD

SEQ ID NO: 5843 - protein, 9 aa, Homo sapiens
  Light chain CDR3 for antibody 2922 (IGKV1-9)
QQLISYPYT

SEQ ID NO: 5844 - protein, 15 aa, Homo sapiens
  Heavy chain CDR3 for antibody 2922 (IGHV1-46)
AREKYYGSDTYPFDS

SEQ ID NO: 5845 - protein, 9 aa, Homo sapiens
  Light chain CDR3 for antibody 2923 (IGKV3-15)
QQYNNWPRT

SEQ ID NO: 5846 - protein, 15 aa, Homo sapiens
  Heavy chain CDR3 for antibody 2923 (IGHV1-46)
AREKYYGSGSYPFDY

SEQ ID NO: 5847 - protein, 9 aa, Homo sapiens
  Light chain CDR3 for antibody 2924 (IGKV1-9)
QQLNSYPFT

SEQ ID NO: 5848 - protein, 17 aa, Homo sapiens
  Heavy chain CDR3 for antibody 2924 (IGHV3-33)
AREITMVGGDNYDGMDG

SEQ ID NO: 5849 - protein, 9 aa, Homo sapiens
  Light chain CDR3 for antibody 2925 (IGKV1D-17)
LQHNSYPYT

SEQ ID NO: 5850 - protein, 17 aa, Homo sapiens
  Heavy chain CDR3 for antibody 2925 (IGHV3-33)
ARAITMGRRDNYYGMDV

SEQ ID NO: 5851 - protein, 9 aa, Homo sapiens
  Light chain CDR3 for antibody 2926 (IGKV1-9)
LQDYNYPWT

SEQ ID NO: 5852 - protein, 18 aa, Homo sapiens
  Heavy chain CDR3 for antibody 2926 (IGHV3-33)
ARDRGIAAAGTYYYGMDV

SEQ ID NO: 5853 - protein, 9 aa, Homo sapiens
  Light chain CDR3 for antibody 2927 (IGKV1-9)
QQLNSYPFT

SEQ ID NO: 5854 - protein, 17 aa, Homo sapiens
  Heavy chain CDR3 for antibody 2927 (IGHV3-30)
AREVTMVRGDNYYALEV

SEQ ID NO: 5855 - protein, 9 aa, Homo sapiens
  Light chain CDR3 for antibody 2928 (IGKV1-9)
QQLNSHPFT

SEQ ID NO: 5856 - protein, 17 aa, Homo sapiens
  Heavy chain CDR3 for antibody 2928 (IGHV3-33)
AREINMVRGEDYYGMDV

SEQ ID NO: 5857 - protein, 9 aa, Homo sapiens
  Light chain CDR3 for antibody 2929 (IGKV1-9)
QQLNSYPYT

SEQ ID NO: 5858 - protein, 15 aa, Homo sapiens
  Heavy chain CDR3 for antibody 2929 (IGHV1-46)
AREKDYGSGSYPIDS

SEQ ID NO: 5859 - protein, 9 aa, Homo sapiens
  Light chain CDR3 for antibody 2930 (IGKV1D-17)
LQHNSYPYT

SEQ ID NO: 5860 - protein, 10 aa, Homo sapiens
  Heavy chain CDR3 for antibody 2930 (IGHV3-30)
ASASTDGIAA

SEQ ID NO: 5861 - protein, 9 aa, Homo sapiens
  Light chain CDR3 for antibody 2931 (IGKV1-9)
QQLNSYPFT

SEQ ID NO: 5862 - protein, 17 aa, Homo sapiens
  Heavy chain CDR3 for antibody 2931 (IGHV3-33)
AREITMIRGANSYGMDV

SEQ ID NO: 5863 - protein, 9 aa, Homo sapiens
  Light chain CDR3 for antibody 2932 (IGKV1-9)
QQLISYPYT

SEQ ID NO: 5864 - protein, 15 aa, Homo sapiens
  Heavy chain CDR3 for antibody 2932 (IGHV1-46)
AREKYYGYGSHPFDS

SEQ ID NO: 5865 - protein, 9 aa, Homo sapiens
  Light chain CDR3 for antibody 2933 (IGKV1-9)
QQLNSHPFT

SEQ ID NO: 5866 - protein, 10 aa, Homo sapiens
  Heavy chain CDR3 for antibody 2933 (IGHV3-33)
ARDSADGMDV

SEQ ID NO: 5867 - protein, 9 aa, Homo sapiens
  Light chain CDR3 for antibody 2934 (IGKV1-9)
QHLNSHPFT

SEQ ID NO: 5868 - protein, 17 aa, Homo sapiens
  Heavy chain CDR3 for antibody 2934 (IGHV3-33)
AREITMVRVHNYYGMDV

SEQ ID NO: 5869 - protein, 9 aa, Homo sapiens
  Light chain CDR3 for antibody 2935 (IGKV1-9)
HQLNSYPYT

SEQ ID NO: 5870 - protein, 15 aa, Homo sapiens
  Heavy chain CDR3 for antibody 2935 (IGHV1-46)
AGEKYHGSGSYPFEY

SEQ ID NO: 5871 - protein, 9 aa, Homo sapiens
  Light chain CDR3 for antibody 2936 (IGKV1D-17)
LQHNSYPYT

SEQ ID NO: 5872 - protein, 10 aa, Homo sapiens
  Heavy chain CDR3 for antibody 2936 (IGHV3-33)
AGESMAGFDY

SEQ ID NO: 5873 - protein, 9 aa, Homo sapiens
  Light chain CDR3 for antibody 2937 (IGKV3-15)
QQYNNCPRT

SEQ ID NO: 5874 - protein, 10 aa, Homo sapiens
  Heavy chain CDR3 for antibody 2937 (IGHV3-33)
ARETVAGFDY

SEQ ID NO: 5875 - protein, 9 aa, Homo sapiens
  Light chain CDR3 for antibody 2938 (IGKV1-9)
QQLNSYPFT

SEQ ID NO: 5876 - protein, 17 aa, Homo sapiens
  Heavy chain CDR3 for antibody 2938 (IGHV3-33)
AREITRVRGDNYYGMDA

SEQ ID NO: 5877 - protein, 9 aa, Homo sapiens
  Light chain CDR3 for antibody 2939 (IGKV1-9)
QQLNSYPYT

SEQ ID NO: 5878 - protein, 15 aa, Homo sapiens
  Heavy chain CDR3 for antibody 2939 (IGHV1-46)
AGEKCYGSAIYPFDY

SEQ ID NO: 5879 - protein, 9 aa, Homo sapiens
  Light chain CDR3 for antibody 2940 (IGKV1D-16)
QQYNSYPYT

SEQ ID NO: 5880 - protein, 19 aa, Homo sapiens
  Heavy chain CDR3 for antibody 2940 (IGHV1-18)
ARDHGYCSSPSCYRAWFDP

SEQ ID NO: 5881 - protein, 9 aa, Homo sapiens
  Light chain CDR3 for antibody 2941 (IGKV1D-17)
LRHNSYPYT

SEQ ID NO: 5882 - protein, 10 aa, Homo sapiens
  Heavy chain CDR3 for antibody 2941 (IGHV3-33)
ASESTDGMAV

SEQ ID NO: 5883 - protein, 9 aa, Homo sapiens
  Light chain CDR3 for antibody 2942 (IGKV1-9)
HQLNSYPYT

SEQ ID NO: 5884 - protein, 15 aa, Homo sapiens
  Heavy chain CDR3 for antibody 2942 (IGHV1-46)
AREKYHGSGSYAFEY

SEQ ID NO: 5885 - protein, 9 aa, Homo sapiens
  Light chain CDR3 for antibody 2943 (IGKV1-27)
QKFNSAPWT

SEQ ID NO: 5886 - protein, 13 aa, Homo sapiens
  Heavy chain CDR3 for antibody 2943 (IGHV3-30)
ARGSGWYNYGMDV

SEQ ID NO: 5887 - protein, 9 aa, Homo sapiens
  Light chain CDR3 for antibody 2944 (IGKV1D-17)
LQHNSYPYT

SEQ ID NO: 5888 - protein, 10 aa, Homo sapiens
  Heavy chain CDR3 for antibody 2944 (IGHV3-33)
ARYSAYGMDF

SEQ ID NO: 5889 - protein, 9 aa, Homo sapiens
  Light chain CDR3 for antibody 2945 (IGKV3D-20)
QQYGSSPLT

SEQ ID NO: 5890 - protein, 10 aa, Homo sapiens
  Heavy chain CDR3 for antibody 2945 (IGHV3-33)
AREAVAGFDY

SEQ ID NO: 5891 - protein, 9 aa, Homo sapiens
  Light chain CDR3 for antibody 2946 (IGKV1D-17)
QQLNSFPFT

SEQ ID NO: 5892 - protein, 17 aa, Homo sapiens
  Heavy chain CDR3 for antibody 2946 (IGHV3-33)
AREITMVRGENSYGIDV

SEQ ID NO: 5893 - protein, 9 aa, Homo sapiens
  Light chain CDR3 for antibody 2947 (IGKV1-9)
QQFNSYPFT

SEQ ID NO: 5894 - protein, 17 aa, Homo sapiens
  Heavy chain CDR3 for antibody 2947 (IGHV3-33)
ARESTLVRGDNYYGMDV

SEQ ID NO: 5895 - protein, 9 aa, Homo sapiens
  Light chain CDR3 for antibody 2948 (IGKV1-9)
QQLNSYPFT

SEQ ID NO: 5896 - protein, 17 aa, Homo sapiens
  Heavy chain CDR3 for antibody 2948 (IGHV3-33)
AREITMVPGDNSYGMDF

SEQ ID NO: 5897 - protein, 9 aa, Homo sapiens
  Light chain CDR3 for antibody 2949 (IGKV1-9)
QQLNSYPYT

SEQ ID NO: 5898 - protein, 10 aa, Homo sapiens
  Heavy chain CDR3 for antibody 2949 (IGHV3-33)
AREATAGMDV

SEQ ID NO: 5899 - protein, 9 aa, Homo sapiens
  Light chain CDR3 for antibody 2950 (IGKV1-9)
QQLNSYPFT

SEQ ID NO: 5900 - protein, 17 aa, Homo sapiens
  Heavy chain CDR3 for antibody 2950 (IGHV3-33)
AREIPMVRGANYYGMDV

SEQ ID NO: 5901 - protein, 9 aa, Homo sapiens
  Light chain CDR3 for antibody 2951 (IGKV1-9)
QQLISYPYT

SEQ ID NO: 5902 - protein, 15 aa, Homo sapiens
  Heavy chain CDR3 for antibody 2951 (IGHV1-46)
AREKYYGAGSYAFDS

SEQ ID NO: 5903 - protein, 9 aa, Homo sapiens
  Light chain CDR3 for antibody 2952 (IGKV1-9)
QQLNSYPFT

SEQ ID NO: 5904 - protein, 17 aa, Homo sapiens
  Heavy chain CDR3 for antibody 2952 (IGHV3-33)
TREITMIRGDNYYGMDV

SEQ ID NO: 5905 - protein, 9 aa, Homo sapiens
  Light chain CDR3 for antibody 2953 (IGKV1-9)
QQLNSYPYT

SEQ ID NO: 5906 - protein, 15 aa, Homo sapiens
  Heavy chain CDR3 for antibody 2953 (IGHV1-46)
AREKYYGSGRSPFDY

SEQ ID NO: 5907 - protein, 9 aa, Homo sapiens
  Light chain CDR3 for antibody 2954 (IGKV1D-17)
LQHNSYPYT

SEQ ID NO: 5908 - protein, 10 aa, Homo sapiens
  Heavy chain CDR3 for antibody 2954 (IGHV3-33)
ARESLAGFDY

SEQ ID NO: 5909 - protein, 9 aa, Homo sapiens
  Light chain CDR3 for antibody 2955 (IGKV1-9)
QQLNSYPFT

SEQ ID NO: 5910 - protein, 17 aa, Homo sapiens
  Heavy chain CDR3 for antibody 2955 (IGHV3-33)
AREIAMVRGDSCYGMDD

SEQ ID NO: 5911 - protein, 9 aa, Homo sapiens
  Light chain CDR3 for antibody 2956 (IGKV1-9)
QQLISYPYT

SEQ ID NO: 5912 - protein, 15 aa, Homo sapiens
  Heavy chain CDR3 for antibody 2956 (IGHV1-46)
AREKYYGSETSPFDS

SEQ ID NO: 5913 - protein, 9 aa, Homo sapiens
  Light chain CDR3 for antibody 2957 (IGKV1D-17)
LQHNSYPYT

SEQ ID NO: 5914 - protein, 13 aa, Homo sapiens
  Heavy chain CDR3 for antibody 2957 (IGHV1-24)
ATDYGDYRYSFDY

SEQ ID NO: 5915 - protein, 9 aa, Homo sapiens
  Light chain CDR3 for antibody 2958 (IGKV1-9)
QQLNSYPFT

SEQ ID NO: 5916 - protein, 17 aa, Homo sapiens
  Heavy chain CDR3 for antibody 2958 (IGHV3-33)
VREIPMVRGANYYGLDV

SEQ ID NO: 5917 - protein, 9 aa, Homo sapiens
  Light chain CDR3 for antibody 2959 (IGKV1D-17)
LQHNSYPYT

SEQ ID NO: 5918 - protein, 10 aa, Homo sapiens
  Heavy chain CDR3 for antibody 2959 (IGHV3-33)
AIKSTDGMDD

SEQ ID NO: 5919 - protein, 9 aa, Homo sapiens
  Light chain CDR3 for antibody 2960 (IGKV1-9)
QQLNSYPYT

SEQ ID NO: 5920 - protein, 10 aa, Homo sapiens
  Heavy chain CDR3 for antibody 2960 (IGHV1-46)
AREATEGFDY

SEQ ID NO: 5921 - protein, 9 aa, Homo sapiens
  Light chain CDR3 for antibody 2961 (IGKV1D-17)
LQHNSYPYT

SEQ ID NO: 5922 - protein, 10 aa, Homo sapiens
  Heavy chain CDR3 for antibody 2961 (IGHV3-33)
PIEAPTAFAY

SEQ ID NO: 5923 - protein, 9 aa, Homo sapiens
  Light chain CDR3 for antibody 2962 (IGKV1-9)
QQLNSYPYT

SEQ ID NO: 5924 - protein, 15 aa, Homo sapiens
  Heavy chain CDR3 for antibody 2962 (IGHV1-46)
VREKCYGSGSYPFDY

SEQ ID NO: 5925 - protein, 9 aa, Homo sapiens
  Light chain CDR3 for antibody 2963 (IGKV1-9)
QQLNSYPYT

SEQ ID NO: 5926 - protein, 15 aa, Homo sapiens
  Heavy chain CDR3 for antibody 2963 (IGHV1-46)
SREKSYGSGSYPFDY

SEQ ID NO: 5927 - protein, 9 aa, Homo sapiens
  Light chain CDR3 for antibody 2964 (IGKV1-9)
QQLNGYPYT

SEQ ID NO: 5928 - protein, 15 aa, Homo sapiens
  Heavy chain CDR3 for antibody 2964 (IGHV1-46)
AREKYYGSGTYPFAY

SEQ ID NO: 5929 - protein, 9 aa, Homo sapiens
  Light chain CDR3 for antibody 2965 (IGKV1-9)
QQLNSYPYT

SEQ ID NO: 5930 - protein, 15 aa, Homo sapiens
  Heavy chain CDR3 for antibody 2965 (IGHV1-46)
SREKYHGSGTYPFDY

SEQ ID NO: 5931 - protein, 9 aa, Homo sapiens
  Light chain CDR3 for antibody 2966 (IGKV1-9)
QHLNSHPFT

SEQ ID NO: 5932 - protein, 17 aa, Homo sapiens
  Heavy chain CDR3 for antibody 2966 (IGHV3-33)
AREITRVRGYNSYGMEV

SEQ ID NO: 5933 - protein, 9 aa, Homo sapiens
  Light chain CDR3 for antibody 2967 (IGKV1-9)
HQLNSYPYT

SEQ ID NO: 5934 - protein, 15 aa, Homo sapiens
  Heavy chain CDR3 for antibody 2967 (IGHV1-46)
AREKYYGSASYPIAY

SEQ ID NO: 5935 - protein, 9 aa, Homo sapiens
  Light chain CDR3 for antibody 2968 (IGKV1-9)
QQLNSYPYT

SEQ ID NO: 5936 - protein, 15 aa, Homo sapiens
  Heavy chain CDR3 for antibody 2968 (IGHV1-46)
AREKYYGAGSDPIDY

SEQ ID NO: 5937 - protein, 9 aa, Homo sapiens
  Light chain CDR3 for antibody 2969 (IGKV6-21)
HQSSSLPYT

SEQ ID NO: 5938 - protein, 16 aa, Homo sapiens
  Heavy chain CDR3 for antibody 2969 (IGHV1-18)
AREGETMVRGAIAIDY

SEQ ID NO: 5939 - protein, 9 aa, Homo sapiens
  Light chain CDR3 for antibody 2970 (IGKV1D-17)
LQHNSYPYT

SEQ ID NO: 5940 - protein, 10 aa, Homo sapiens
  Heavy chain CDR3 for antibody 2970 (IGHV3-23)
AIKSTYAIDI

SEQ ID NO: 5941 - protein, 9 aa, Homo sapiens
  Light chain CDR3 for antibody 2971 (IGKV1D-17)
LQHNSYPYT

SEQ ID NO: 5942 - protein, 15 aa, Homo sapiens
  Heavy chain CDR3 for antibody 2971 (IGHV1-46)
AREKYHGSATYPFDY

SEQ ID NO: 5943 - protein, 9 aa, Homo sapiens
  Light chain CDR3 for antibody 2972 (IGKV1-9)
QQLNSYPYT

SEQ ID NO: 5944 - protein, 15 aa, Homo sapiens
  Heavy chain CDR3 for antibody 2972 (IGHV1-46)
AREKDYGSEHYPFDY

SEQ ID NO: 5945 - protein, 9 aa, Homo sapiens
  Light chain CDR3 for antibody 2973 (IGKV1-9)
QQLNGYPYT

SEQ ID NO: 5946 - protein, 17 aa, Homo sapiens
  Heavy chain CDR3 for antibody 2973 (IGHV3-33)
AREISMARGDNYYGMDV

SEQ ID NO: 5947 - protein, 9 aa, Homo sapiens
  Light chain CDR3 for antibody 2974 (IGKV1-9)
QQLNSHPFT

SEQ ID NO: 5948 - protein, 17 aa, Homo sapiens
  Heavy chain CDR3 for antibody 2974 (IGHV3-30)
AREITMVRGHNYYAMDV

SEQ ID NO: 5949 - protein, 9 aa, Homo sapiens
  Light chain CDR3 for antibody 2975 (IGKV1-9)
QQLNSYPFT

SEQ ID NO: 5950 - protein, 15 aa, Homo sapiens
  Heavy chain CDR3 for antibody 2975 (IGHV3-33)
AREKSHGSGSYPFDY

SEQ ID NO: 5951 - protein, 9 aa, Homo sapiens
  Light chain CDR3 for antibody 2976 (IGKV1-9)
QQLNSYPFT

SEQ ID NO: 5952 - protein, 17 aa, Homo sapiens
  Heavy chain CDR3 for antibody 2976 (IGHV3-33)
ARDRGAAALYYYYGMDV

SEQ ID NO: 5953 - protein, 9 aa, Homo sapiens
  Light chain CDR3 for antibody 2977 (IGKV1D-17)
LQHNSYPYT

SEQ ID NO: 5954 - protein, 10 aa, Homo sapiens
  Heavy chain CDR3 for antibody 2977 (IGHV3-66)
ARAAMAGFDY

SEQ ID NO: 5955 - protein, 9 aa, Homo sapiens
  Light chain CDR3 for antibody 2978 (IGKV1-9)
QQLISYPYT

SEQ ID NO: 5956 - protein, 15 aa, Homo sapiens
  Heavy chain CDR3 for antibody 2978 (IGHV1-46)
AREKSYVSGSSPFDS

SEQ ID NO: 5957 - protein, 9 aa, Homo sapiens
  Light chain CDR3 for antibody 2979 (IGKV1-9)
QQLNSYPFT

SEQ ID NO: 5958 - protein, 17 aa, Homo sapiens
  Heavy chain CDR3 for antibody 2979 (IGHV3-33)
AREITMIRGDNYYGLDD

SEQ ID NO: 5959 - protein, 9 aa, Homo sapiens
  Light chain CDR3 for antibody 2980 (IGKV1D-17)
LQHNSYPYT

SEQ ID NO: 5960 - protein, 10 aa, Homo sapiens
  Heavy chain CDR3 for antibody 2980 (IGHV3-33)
AGAYTYGMDS

SEQ ID NO: 5961 - protein, 9 aa, Homo sapiens
  Light chain CDR3 for antibody 2981 (IGKV1D-17)
LQHNSYPYT

SEQ ID NO: 5962 - protein, 10 aa, Homo sapiens
  Heavy chain CDR3 for antibody 2981 (IGHV3-33)
AGASPDGMDD

SEQ ID NO: 5963 - protein, 9 aa, Homo sapiens
  Light chain CDR3 for antibody 2982 (IGKV1-9)
QQLNSYPYT

SEQ ID NO: 5964 - protein, 15 aa, Homo sapiens
  Heavy chain CDR3 for antibody 2982 (IGHV1-46)
AREKYYGSGSSPCDS

SEQ ID NO: 5965 - protein, 9 aa, Homo sapiens
  Light chain CDR3 for antibody 2983 (IGKV1D-17)
LQHNSYPWT

SEQ ID NO: 5966 - protein, 10 aa, Homo sapiens
  Heavy chain CDR3 for antibody 2983 (IGHV3-33)
TREATDGMDA

SEQ ID NO: 5967 - protein, 9 aa, Homo sapiens
  Light chain CDR3 for antibody 2984 (IGKV1-9)
QQLNSYPFT

SEQ ID NO: 5968 - protein, 17 aa, Homo sapiens
  Heavy chain CDR3 for antibody 2984 (IGHV3-33)
AREITMVRGENYYGMDD

SEQ ID NO: 5969 - protein, 9 aa, Homo sapiens
  Light chain CDR3 for antibody 2985 (IGKV1D-17)
LQHNSYPYT

SEQ ID NO: 5970 - protein, 10 aa, Homo sapiens
  Heavy chain CDR3 for antibody 2985 (IGHV3-33)
ARESVAGFDY

SEQ ID NO: 5971 - protein, 9 aa, Homo sapiens
  Light chain CDR3 for antibody 2986 (IGKV1-9)
QQLNGFPYT

SEQ ID NO: 5972 - protein, 15 aa, Homo sapiens
  Heavy chain CDR3 for antibody 2986 (IGHV1-46)
AREKYHGSGSYPFDY

SEQ ID NO: 5973 - protein, 9 aa, Homo sapiens
  Light chain CDR3 for antibody 2987 (IGKV6-21)
HQSSSLPYT

SEQ ID NO: 5974 - protein, 13 aa, Homo sapiens
  Heavy chain CDR3 for antibody 2987 (IGHV1-18)
AREGGSYYVSFDY

SEQ ID NO: 5975 - protein, 9 aa, Homo sapiens
  Light chain CDR3 for antibody 2988 (IGKV1-9)
QQLNSYPYT

SEQ ID NO: 5976 - protein, 16 aa, Homo sapiens
  Heavy chain CDR3 for antibody 2988 (IGHV1-18)
AREGDTMVRGVIAFDY

SEQ ID NO: 5977 - protein, 9 aa, Homo sapiens
  Light chain CDR3 for antibody 2989 (IGKV1D-17)
LQHNSYPYT

SEQ ID NO: 5978 - protein, 10 aa, Homo sapiens
  Heavy chain CDR3 for antibody 2989 (IGHV3-33)
AREATEGFDY

SEQ ID NO: 5979 - protein, 9 aa, Homo sapiens
  Light chain CDR3 for antibody 2990 (IGKV1-9)
QQLNSYPYT

SEQ ID NO: 5980 - protein, 17 aa, Homo sapiens
  Heavy chain CDR3 for antibody 2990 (IGHV3-33)
AREITMLRGDNYYGLDV

SEQ ID NO: 5981 - protein, 9 aa, Homo sapiens
  Light chain CDR3 for antibody 2991 (IGKV1-9)
QQLNSYPYT

SEQ ID NO: 5982 - protein, 13 aa, Homo sapiens
  Heavy chain CDR3 for antibody 2991 (IGHV3-33)
ARDYCSGDCYPDP

SEQ ID NO: 5983 - protein, 9 aa, Homo sapiens
  Light chain CDR3 for antibody 2992 (IGKV1-9)
QQLNSYPFT

SEQ ID NO: 5984 - protein, 10 aa, Homo sapiens
  Heavy chain CDR3 for antibody 2992 (IGHV3-33)
ARESVAGFDY

SEQ ID NO: 5985 - protein, 9 aa, Homo sapiens
  Light chain CDR3 for antibody 2993 (IGKV6-21)
HQSSSLPYT

SEQ ID NO: 5986 - protein, 14 aa, Homo sapiens
  Heavy chain CDR3 for antibody 2993 (IGHV1-18)
AREGYSGYIVYFDY

SEQ ID NO: 5987 - protein, 9 aa, Homo sapiens
  Light chain CDR3 for antibody 2994 (IGKV1-9)
QQLDSHPFT

SEQ ID NO: 5988 - protein, 17 aa, Homo sapiens
  Heavy chain CDR3 for antibody 2994 (IGHV3-33)
AREITMVRGDNYYGLDV

SEQ ID NO: 5989 - protein, 9 aa, Homo sapiens
  Light chain CDR3 for antibody 2995 (IGKV1-13)
QQFNSHPFT

SEQ ID NO: 5990 - protein, 17 aa, Homo sapiens
  Heavy chain CDR3 for antibody 2995 (IGHV3-33)
AREITLVRGDNYYGMDV

SEQ ID NO: 5991 - protein, 9 aa, Homo sapiens
  Light chain CDR3 for antibody 2996 (IGKV1-9)
QQFNSHPFT

SEQ ID NO: 5992 - protein, 15 aa, Homo sapiens
  Heavy chain CDR3 for antibody 2996 (IGHV1-46)
AREKYYGSGSYPFDY

SEQ ID NO: 5993 - protein, 9 aa, Homo sapiens
  Light chain CDR3 for antibody 2997 (IGKV1D-13)
QQFNNYPRT

SEQ ID NO: 5994 - protein, 16 aa, Homo sapiens
  Heavy chain CDR3 for antibody 2997 (IGHV3-33)
ARFGYSYGYDYYGMDV

SEQ ID NO: 5995 - protein, 9 aa, Homo sapiens
  Light chain CDR3 for antibody 2998 (IGKV1-17)
LQHNSYPYT

SEQ ID NO: 5996 - protein, 10 aa, Homo sapiens
  Heavy chain CDR3 for antibody 2998 (IGHV3-33)
AREGTDGFDP

SEQ ID NO: 5997 - protein, 9 aa, Homo sapiens
  Light chain CDR3 for antibody 2999 (IGKV1-9)
QQLNSHPFT

SEQ ID NO: 5998 - protein, 17 aa, Homo sapiens
  Heavy chain CDR3 for antibody 2999 (IGHV3-33)
VREISLVRGDNYYGLDV

SEQ ID NO: 5999 - protein, 9 aa, Homo sapiens
  Light chain CDR3 for antibody 3000 (IGKV6-21)
HQSSSLPYT

SEQ ID NO: 6000 - protein, 10 aa, Homo sapiens
  Heavy chain CDR3 for antibody 3000 (IGHV3-33)
ARESVAGFDY

SEQ ID NO: 6001 - protein, 9 aa, Homo sapiens
  Light chain CDR3 for antibody 3001 (IGKV1-9)
QQLNSYPLT

SEQ ID NO: 6002 - protein, 13 aa, Homo sapiens
  Heavy chain CDR3 for antibody 3001 (IGHV1-2)
ARDDYGDYDYFDF

SEQ ID NO: 6003 - protein, 9 aa, Homo sapiens
  Light chain CDR3 for antibody 3002 (IGKV1D-17)
LQHNSYPWT

SEQ ID NO: 6004 - protein, 13 aa, Homo sapiens
  Heavy chain CDR3 for antibody 3002 (IGHV3-33)
AREGPVWGMLFDI

SEQ ID NO: 6005 - protein, 9 aa, Homo sapiens
  Light chain CDR3 for antibody 3003 (IGKV6-21)
HQSSSLPYT

SEQ ID NO: 6006 - protein, 15 aa, Homo sapiens
  Heavy chain CDR3 for antibody 3003 (IGHV1-46)
AREGLTGYYPNWFDP

SEQ ID NO: 6007 - protein, 9 aa, Homo sapiens
  Light chain CDR3 for antibody 3004 (IGKV1D-16)
QQYNSYPYT

SEQ ID NO: 6008 - protein, 13 aa, Homo sapiens
  Heavy chain CDR3 for antibody 3004 (IGHV3-33)
ARDEAVAGTYFDY

SEQ ID NO: 6009 - protein, 9 aa, Homo sapiens
  Light chain CDR3 for antibody 3005 (IGKV1D-17)
LQHNTYPYT

SEQ ID NO: 6010 - protein, 10 aa, Homo sapiens
  Heavy chain CDR3 for antibody 3005 (IGHV3-33)
AREAVGGFDY

SEQ ID NO: 6011 - protein, 9 aa, Homo sapiens
  Light chain CDR3 for antibody 3006 (IGKV1-9)
QQLNGYPYT

SEQ ID NO: 6012 - protein, 15 aa, Homo sapiens
  Heavy chain CDR3 for antibody 3006 (IGHV1-46)
AREKSYGSGSYPFDY

SEQ ID NO: 6013 - protein, 9 aa, Homo sapiens
  Light chain CDR3 for antibody 3007 (IGKV1-6)
LQDYNYPWT

SEQ ID NO: 6014 - protein, 13 aa, Homo sapiens
  Heavy chain CDR3 for antibody 3007 (IGHV3-13)
ARGGWELFDAFDI

SEQ ID NO: 6015 - protein, 9 aa, Homo sapiens
  Light chain CDR3 for antibody 3008 (IGKV3-20)
QQYGSSPLT

SEQ ID NO: 6016 - protein, 13 aa, Homo sapiens
  Heavy chain CDR3 for antibody 3008 (IGHV1-18)
ARDRVLWFGECDY

SEQ ID NO: 6017 - protein, 9 aa, Homo sapiens
  Light chain CDR3 for antibody 3009 (IGKV1-9)
QQYNSYPLT

SEQ ID NO: 6018 - protein, 13 aa, Homo sapiens
  Heavy chain CDR3 for antibody 3009 (IGHV1-18)
AREGGSYYVSFDY

SEQ ID NO: 6019 - protein, 9 aa, Homo sapiens
  Light chain CDR3 for antibody 3010 (IGKV1-9)
QQLNGFPYT

SEQ ID NO: 6020 - protein, 15 aa, Homo sapiens
  Heavy chain CDR3 for antibody 3010 (IGHV1-46)
AREGLTGYYPNWFDP

SEQ ID NO: 6021 - protein, 9 aa, Homo sapiens
  Light chain CDR3 for antibody 3011 (IGKV1-9)
QQFNSYPFT

SEQ ID NO: 6022 - protein, 17 aa, Homo sapiens
  Heavy chain CDR3 for antibody 3011 (IGHV3-33)
AREITMVRGDNYYGLDV

SEQ ID NO: 6023 - protein, 9 aa, Homo sapiens
  Light chain CDR3 for antibody 3012 (IGKV1-27)
QKYNSAPWT

SEQ ID NO: 6024 - protein, 10 aa, Homo sapiens
  Heavy chain CDR3 for antibody 3012 (IGHV3-33)
AREAVAGFDY

SEQ ID NO: 6025 - protein, 9 aa, Homo sapiens
  Light chain CDR3 for antibody 3013 (IGKV1-9)
QQLNGYPYT

SEQ ID NO: 6026 - protein, 13 aa, Homo sapiens
  Heavy chain CDR3 for antibody 3013 (IGHV4-59)
ARGGSYYYYGMDV

SEQ ID NO: 6027 - protein, 9 aa, Homo sapiens
  Light chain CDR3 for antibody 3014 (IGKV1-9)
QQLNSYPFT

SEQ ID NO: 6028 - protein, 10 aa, Homo sapiens
  Heavy chain CDR3 for antibody 3014 (IGHV3-33)
AREATEGFDY

SEQ ID NO: 6029 - protein, 9 aa, Homo sapiens
  Light chain CDR3 for antibody 3015 (IGKV1-9)
QQLNSYPFT

SEQ ID NO: 6030 - protein, 12 aa, Homo sapiens
  Heavy chain CDR3 for antibody 3015 (IGHV3-23)
AKEGIAAAGLDY

SEQ ID NO: 6031 - protein, 9 aa, Homo sapiens
  Light chain CDR3 for antibody 3016 (IGKV1D-16)
QQYNSYPYT

SEQ ID NO: 6032 - protein, 12 aa, Homo sapiens
  Heavy chain CDR3 for antibody 3016 (IGHV3-33)
ARRELEGYYFDY

SEQ ID NO: 6033 - protein, 9 aa, Homo sapiens
  Light chain CDR3 for antibody 3017 (IGKV1D-13)
QQFNNYPRT

SEQ ID NO: 6034 - protein, 13 aa, Homo sapiens
  Heavy chain CDR3 for antibody 3017 (IGHV1-24)
ATDRYSGRNYFDY

SEQ ID NO: 6035 - protein, 9 aa, Homo sapiens
  Light chain CDR3 for antibody 3018 (IGKV1-9)
QQLNGYPYT

SEQ ID NO: 6036 - protein, 17 aa, Homo sapiens
  Heavy chain CDR3 for antibody 3018 (IGHV3-33)
AREITMVRGDNYYGMDV

SEQ ID NO: 6037 - protein, 9 aa, Homo sapiens
  Light chain CDR3 for antibody 3019 (IGKV1-17)
LQHNSYPLT

SEQ ID NO: 6038 - protein, 10 aa, Homo sapiens
  Heavy chain CDR3 for antibody 3019 (IGHV1-46)
ARERWELFDY

SEQ ID NO: 6039 - protein, 9 aa, Homo sapiens
  Light chain CDR3 for antibody 3020 (IGKV1-9)
QQLNGYPYT

SEQ ID NO: 6040 - protein, 15 aa, Homo sapiens
  Heavy chain CDR3 for antibody 3020 (IGHV1-46)
AREDYYGSGSYPFDS

SEQ ID NO: 6041 - protein, 9 aa, Homo sapiens
  Light chain CDR3 for antibody 3021 (IGKV1-9)
QQLNSYPWT

SEQ ID NO: 6042 - protein, 13 aa, Homo sapiens
  Heavy chain CDR3 for antibody 3021 (IGHV3-33)
AREYCGGDCYGDY

SEQ ID NO: 6043 - protein, 9 aa, Homo sapiens
  Light chain CDR3 for antibody 3022 (IGKV1-9)
QQFNSHPFT

SEQ ID NO: 6044 - protein, 16 aa, Homo sapiens
  Heavy chain CDR3 for antibody 3022 (IGHV3-33)
ARFGYSYGYDYYGMDV

SEQ ID NO: 6045 - protein, 9 aa, Homo sapiens
  Light chain CDR3 for antibody 3023 (IGKV1-9)
QQLNGYPYT

SEQ ID NO: 6046 - protein, 10 aa, Homo sapiens
  Heavy chain CDR3 for antibody 3023 (IGHV3-33)
AREAVAGFDY

SEQ ID NO: 6047 - protein, 9 aa, Homo sapiens
  Light chain CDR3 for antibody 3024 (IGKV1D-16)
QQYNSYPRT

SEQ ID NO: 6048 - protein, 16 aa, Homo sapiens
  Heavy chain CDR3 for antibody 3024 (IGHV1-46)
ARDGNPENYYYYGMDV

SEQ ID NO: 6049 - protein, 9 aa, Homo sapiens
  Light chain CDR3 for antibody 3025 (IGKV1-9)
QQFNSHPFT

SEQ ID NO: 6050 - protein, 10 aa, Homo sapiens
  Heavy chain CDR3 for antibody 3025 (IGHV3-33)
ARRVTDAFDI

SEQ ID NO: 6051 - protein, 9 aa, Homo sapiens
  Light chain CDR3 for antibody 3026 (IGKV1-9)
QQFNSHPFT

SEQ ID NO: 6052 - protein, 16 aa, Homo sapiens
  Heavy chain CDR3 for antibody 3026 (IGHV1-18)
AREGDTMVRGVIAFDY

SEQ ID NO: 6053 - protein, 9 aa, Homo sapiens
  Light chain CDR3 for antibody 3027 (IGKV1-6)
LQDYNYPYT

SEQ ID NO: 6054 - protein, 16 aa, Homo sapiens
  Heavy chain CDR3 for antibody 3027 (IGHV3-11)
ARDRGGSYDYYYGMDV

SEQ ID NO: 6055 - protein, 9 aa, Homo sapiens
  Light chain CDR3 for antibody 3028 (IGKV6-21)
HQSSSLPYT

SEQ ID NO: 6056 - protein, 16 aa, Homo sapiens
  Heavy chain CDR3 for antibody 3028 (IGHV1-69)
ATEGAVAGYYYYGMDV

SEQ ID NO: 6057 - protein, 9 aa, Homo sapiens
  Light chain CDR3 for antibody 3029 (IGKV6-21)
HQSSSLPYT

SEQ ID NO: 6058 - protein, 13 aa, Homo sapiens
  Heavy chain CDR3 for antibody 3029 (IGHV1-18)
AREGGNYIVSFDY

SEQ ID NO: 6059 - protein, 9 aa, Homo sapiens
  Light chain CDR3 for antibody 3030 (IGKV1-9)
QQLNGYPYT

SEQ ID NO: 6060 - protein, 13 aa, Homo sapiens
  Heavy chain CDR3 for antibody 3030 (IGHV1-18)
AREGGSYYVSFDY

SEQ ID NO: 6061 - protein, 9 aa, Homo sapiens
  Light chain CDR3 for antibody 3031 (IGKV1-9)
HQLISYPYT

SEQ ID NO: 6062 - protein, 15 aa, Homo sapiens
  Heavy chain CDR3 for antibody 3031 (IGHV1-46)
AREKYYGLGSYPFDC

SEQ ID NO: 6063 - protein, 9 aa, Homo sapiens
  Light chain CDR3 for antibody 3032 (IGKV1D-17)
QQLNGYPYT

SEQ ID NO: 6064 - protein, 15 aa, Homo sapiens
  Heavy chain CDR3 for antibody 3032 (IGHV1-46)
AREKYYGSGSDAFDY

SEQ ID NO: 6065 - protein, 9 aa, Homo sapiens
  Light chain CDR3 for antibody 3033 (IGKV3-11)
QQRSNWPWT

SEQ ID NO: 6066 - protein, 14 aa, Homo sapiens
  Heavy chain CDR3 for antibody 3033 (IGHV3-23)
AKDRTVAGPNWFDP

SEQ ID NO: 6067 - protein, 9 aa, Homo sapiens
  Light chain CDR3 for antibody 3034 (IGKV1D-13)
QQFNNYMYT

SEQ ID NO: 6068 - protein, 16 aa, Homo sapiens
  Heavy chain CDR3 for antibody 3034 (IGHV1-24)
ATEGAVAGYYYYGMDV

SEQ ID NO: 6069 - protein, 9 aa, Homo sapiens
  Light chain CDR3 for antibody 3035 (IGKV1-9)
QQLNSYPPT

SEQ ID NO: 6070 - protein, 14 aa, Homo sapiens
  Heavy chain CDR3 for antibody 3035 (IGHV4-59)
AREGMQLWPTAFDI

SEQ ID NO: 6071 - protein, 9 aa, Homo sapiens
  Light chain CDR3 for antibody 3036 (IGKV1D-17)
LQHNSYPWT

SEQ ID NO: 6072 - protein, 10 aa, Homo sapiens
  Heavy chain CDR3 for antibody 3036 (IGHV3-33)
ARESRSGVDY

SEQ ID NO: 6073 - protein, 8 aa, Homo sapiens
  Light chain CDR3 for antibody 3037 (IGKV3-20)
QQYGSSFT

SEQ ID NO: 6074 - protein, 11 aa, Homo sapiens
  Heavy chain CDR3 for antibody 3037 (IGHV3-33)
AAGRDYYGMDV

SEQ ID NO: 6075 - protein, 9 aa, Homo sapiens
  Light chain CDR3 for antibody 3038 (IGKV1-27)
QKYNSAPWT

SEQ ID NO: 6076 - protein, 12 aa, Homo sapiens
  Heavy chain CDR3 for antibody 3038 (IGHV1-46)
ARVMRISDAFDI

SEQ ID NO: 6077 - protein, 9 aa, Homo sapiens
  Light chain CDR3 for antibody 3039 (IGKV1-9)
HQLIGYPYT

SEQ ID NO: 6078 - protein, 15 aa, Homo sapiens
  Heavy chain CDR3 for antibody 3039 (IGHV1-46)
AREKYSGSGSYPFDY

SEQ ID NO: 6079 - protein, 9 aa, Homo sapiens
  Light chain CDR3 for antibody 3040 (IGKV1-6)
LQDYNYPFT

SEQ ID NO: 6080 - protein, 13 aa, Homo sapiens
  Heavy chain CDR3 for antibody 3040 (IGHV1-18)
AREGGSYYVSFDY

SEQ ID NO: 6081 - protein, 9 aa, Homo sapiens
  Light chain CDR3 for antibody 3041 (IGKV1-9)
QQLNSYPYT

SEQ ID NO: 6082 - protein, 14 aa, Homo sapiens
  Heavy chain CDR3 for antibody 3041 (IGHV1-18)
AREGYSGYIVYFDY

SEQ ID NO: 6083 - protein, 9 aa, Homo sapiens
  Light chain CDR3 for antibody 3042 (IGKV1-9)
QQLNGYPYT

SEQ ID NO: 6084 - protein, 15 aa, Homo sapiens
  Heavy chain CDR3 for antibody 3042 (IGHV1-46)
ARDKYYGSGTYPFDY

SEQ ID NO: 6085 - protein, 9 aa, Homo sapiens
  Light chain CDR3 for antibody 3043 (IGKV1-9)
QQLNSYPFT

SEQ ID NO: 6086 - protein, 17 aa, Homo sapiens
  Heavy chain CDR3 for antibody 3043 (IGHV3-33)
AREIALVRGDNYYGMDV

SEQ ID NO: 6087 - protein, 9 aa, Homo sapiens
  Light chain CDR3 for antibody 3044 (IGKV6-21)
HQSSSLPYT

SEQ ID NO: 6088 - protein, 16 aa, Homo sapiens
  Heavy chain CDR3 for antibody 3044 (IGHV1-46)
ARDRDIVATGEYYFDY

SEQ ID NO: 6089 - protein, 9 aa, Homo sapiens
  Light chain CDR3 for antibody 3045 (IGKV1-9)
QQLNGYPYT

SEQ ID NO: 6090 - protein, 15 aa, Homo sapiens
  Heavy chain CDR3 for antibody 3045 (IGHV1-46)
AREKDYGSGSYRFDY

SEQ ID NO: 6091 - protein, 8 aa, Homo sapiens
  Light chain CDR3 for antibody 3046 (IGKV1-5)
QQYNSYLT

SEQ ID NO: 6092 - protein, 10 aa, Homo sapiens
  Heavy chain CDR3 for antibody 3046 (IGHV3-33)
ARRVTDAFDI

SEQ ID NO: 6093 - protein, 9 aa, Homo sapiens
  Light chain CDR3 for antibody 3047 (IGKV1-27)
QKYNSAPYT

SEQ ID NO: 6094 - protein, 15 aa, Homo sapiens
  Heavy chain CDR3 for antibody 3047 (IGHV4-59)
ARERVYYGSGSYYDY

SEQ ID NO: 6095 - protein, 9 aa, Homo sapiens
  Light chain CDR3 for antibody 3048 (IGKV1-9)
QQLNSYPYT

SEQ ID NO: 6096 - protein, 15 aa, Homo sapiens
  Heavy chain CDR3 for antibody 3048 (IGHV1-46)
AREKCYGAGSDPFDY

SEQ ID NO: 6097 - protein, 9 aa, Homo sapiens
  Light chain CDR3 for antibody 3049 (IGKV1-27)
QKYNSAPPT

SEQ ID NO: 6098 - protein, 15 aa, Homo sapiens
  Heavy chain CDR3 for antibody 3049 (IGHV4-59)
ARENYGSGSLYYFDY

SEQ ID NO: 6099 - protein, 10 aa, Homo sapiens
  Light chain CDR3 for antibody 3050 (IGKV3D-20)
QQYGSSLTWT

SEQ ID NO: 6100 - protein, 15 aa, Homo sapiens
  Heavy chain CDR3 for antibody 3050 (IGHV3-20)
AREDGDSYYYYGMDV

SEQ ID NO: 6101 - protein, 9 aa, Homo sapiens
  Light chain CDR3 for antibody 3051 (IGKV1-6)
LQDYNYPWT

SEQ ID NO: 6102 - protein, 17 aa, Homo sapiens
  Heavy chain CDR3 for antibody 3051 (IGHV3-33)
AREITMVRGDNYYGMDV

SEQ ID NO: 6103 - protein, 9 aa, Homo sapiens
  Light chain CDR3 for antibody 3052 (IGKV1-9)
QQLNSYPYT

SEQ ID NO: 6104 - protein, 17 aa, Homo sapiens
  Heavy chain CDR3 for antibody 3052 (IGHV3-33)
ASEITLVRGDNYYGMDV

SEQ ID NO: 6105 - protein, 9 aa, Homo sapiens
  Light chain CDR3 for antibody 3053 (IGKV1-9)
QQLNSYPYT

SEQ ID NO: 6106 - protein, 15 aa, Homo sapiens
  Heavy chain CDR3 for antibody 3053 (IGHV1-46)
AREKYYGAGSYAFDD

SEQ ID NO: 6107 - protein, 9 aa, Homo sapiens
  Light chain CDR3 for antibody 3054 (IGKV1-17)
LQHNSYPYT

SEQ ID NO: 6108 - protein, 11 aa, Homo sapiens
  Heavy chain CDR3 for antibody 3054 (IGHV1-8)
AREGSGSYLGY

SEQ ID NO: 6109 - protein, 9 aa, Homo sapiens
  Light chain CDR3 for antibody 3055 (IGKV3-20)
QQYGSSPFT

SEQ ID NO: 6110 - protein, 16 aa, Homo sapiens
  Heavy chain CDR3 for antibody 3055 (IGHV1-24)
ATSLRYFDWLSSWFDP

SEQ ID NO: 6111 - protein, 9 aa, Homo sapiens
  Light chain CDR3 for antibody 3056 (IGKV1D-17)
LQDYNYPFT

SEQ ID NO: 6112 - protein, 10 aa, Homo sapiens
  Heavy chain CDR3 for antibody 3056 (IGHV3-33)
ARESVAGFDY

SEQ ID NO: 6113 - protein, 9 aa, Homo sapiens
  Light chain CDR3 for antibody 3057 (IGKV1-17)
LQHNSYPHT

SEQ ID NO: 6114 - protein, 16 aa, Homo sapiens
  Heavy chain CDR3 for antibody 3057 (IGHV4-61)
ARERYIAVAGTTYFDL

SEQ ID NO: 6115 - protein, 9 aa, Homo sapiens
  Light chain CDR3 for antibody 3058 (IGKV1-13)
QQSYSTPPT

SEQ ID NO: 6116 - protein, 13 aa, Homo sapiens
  Heavy chain CDR3 for antibody 3058 (IGHV4-59)
AREDYYGSGSYYY

SEQ ID NO: 6117 - protein, 9 aa, Homo sapiens
  Light chain CDR3 for antibody 3059 (IGKV1-9)
QQLNSYPYT

SEQ ID NO: 6118 - protein, 15 aa, Homo sapiens
  Heavy chain CDR3 for antibody 3059 (IGHV1-46)
ARENYYGSATYPFDY

SEQ ID NO: 6119 - protein, 9 aa, Homo sapiens
  Light chain CDR3 for antibody 3060 (IGKV1-39)
QQSYSTPYT

SEQ ID NO: 6120 - protein, 17 aa, Homo sapiens
  Heavy chain CDR3 for antibody 3060 (IGHV4-59)
AREAYYYGSGPGYGMDV

SEQ ID NO: 6121 - protein, 9 aa, Homo sapiens
  Light chain CDR3 for antibody 3061 (IGKV1D-13)
QQFNNYIFT

SEQ ID NO: 6122 - protein, 13 aa, Homo sapiens
  Heavy chain CDR3 for antibody 3061 (IGHV3-33)
ARDMVLWFGELLS

SEQ ID NO: 6123 - protein, 9 aa, Homo sapiens
  Light chain CDR3 for antibody 3062 (IGKV1-9)
QQFNSHPFT

SEQ ID NO: 6124 - protein, 10 aa, Homo sapiens
  Heavy chain CDR3 for antibody 3062 (IGHV3-33)
AREAVAGFDY

SEQ ID NO: 6125 - protein, 9 aa, Homo sapiens
  Light chain CDR3 for antibody 3063 (IGKV6-21)
HQSSSLPYT

SEQ ID NO: 6126 - protein, 13 aa, Homo sapiens
  Heavy chain CDR3 for antibody 3063 (IGHV1-18)
AREGGNYYVSIDH

SEQ ID NO: 6127 - protein, 10 aa, Homo sapiens
  Light chain CDR3 for antibody 3064 (IGKV3D-20)
QQYGSSLTWT

SEQ ID NO: 6128 - protein, 14 aa, Homo sapiens
  Heavy chain CDR3 for antibody 3064 (IGHV3-33)
ARGARYFDYYGMDV

SEQ ID NO: 6129 - protein, 9 aa, Homo sapiens
  Light chain CDR3 for antibody 3065 (IGKV1-9)
QQLNSYPFT

SEQ ID NO: 6130 - protein, 15 aa, Homo sapiens
  Heavy chain CDR3 for antibody 3065 (IGHV3-33)
AREITMVRGVIAFDY

SEQ ID NO: 6131 - protein, 9 aa, Homo sapiens
  Light chain CDR3 for antibody 3066 (IGKV1-9)
QQLNSYPYT

SEQ ID NO: 6132 - protein, 13 aa, Homo sapiens
  Heavy chain CDR3 for antibody 3066 (IGHV1-18)
AREGGNYIVSFDY

SEQ ID NO: 6133 - protein, 10 aa, Homo sapiens
  Light chain CDR3 for antibody 3067 (IGKV3-11)
QQRSNWPPWT

SEQ ID NO: 6134 - protein, 15 aa, Homo sapiens
  Heavy chain CDR3 for antibody 3067 (IGHV3-33)
ARDRAPNWGSEAFDI

SEQ ID NO: 6135 - protein, 9 aa, Homo sapiens
  Light chain CDR3 for antibody 3068 (IGKV1-9)
QQLNSYPYT

SEQ ID NO: 6136 - protein, 14 aa, Homo sapiens
  Heavy chain CDR3 for antibody 3068 (IGHV4-59)
AREDRGYYYYGMDV

SEQ ID NO: 6137 - protein, 9 aa, Homo sapiens
  Light chain CDR3 for antibody 3069 (IGKV6-21)
HQSSSLPYT

SEQ ID NO: 6138 - protein, 15 aa, Homo sapiens
  Heavy chain CDR3 for antibody 3069 (IGHV1-18)
ARDRARIAVAGNFDY

SEQ ID NO: 6139 - protein, 9 aa, Homo sapiens
  Light chain CDR3 for antibody 3070 (IGKV1-6)
LQDYNYPWT

SEQ ID NO: 6140 - protein, 18 aa, Homo sapiens
  Heavy chain CDR3 for antibody 3070 (IGHV3-11)
ARDSSSWYPYYYYYGMDV

SEQ ID NO: 6141 - protein, 9 aa, Homo sapiens
  Light chain CDR3 for antibody 3071 (IGKV1-9)
HQLNSYPYT

SEQ ID NO: 6142 - protein, 15 aa, Homo sapiens
  Heavy chain CDR3 for antibody 3071 (IGHV1-46)
AREKYDGSGSDPFDY

SEQ ID NO: 6143 - protein, 9 aa, Homo sapiens
  Light chain CDR3 for antibody 3072 (IGKV1-9)
QQLNGYPYT

SEQ ID NO: 6144 - protein, 15 aa, Homo sapiens
  Heavy chain CDR3 for antibody 3072 (IGHV1-46)
AREKCDGSGSDPFDY

SEQ ID NO: 6145 - protein, 9 aa, Homo sapiens
  Light chain CDR3 for antibody 3073 (IGKV1D-17)
LQHNSYPYT

SEQ ID NO: 6146 - protein, 16 aa, Homo sapiens
  Heavy chain CDR3 for antibody 3073 (IGHV3-33)
ARAGLLWFGELGWMDV

SEQ ID NO: 6147 - protein, 9 aa, Homo sapiens
  Light chain CDR3 for antibody 3074 (IGKV6-21)
HQSSSLPYT

SEQ ID NO: 6148 - protein, 18 aa, Homo sapiens
  Heavy chain CDR3 for antibody 3074 (IGHV1-18)
AREGDTMVRGDNYYGMDV

SEQ ID NO: 6149 - protein, 9 aa, Homo sapiens
  Light chain CDR3 for antibody 3075 (IGKV1-9)
QQLNSYPYT

SEQ ID NO: 6150 - protein, 15 aa, Homo sapiens
  Heavy chain CDR3 for antibody 3075 (IGHV1-46)
AREKYYGSGTSPFDY

SEQ ID NO: 6151 - protein, 9 aa, Homo sapiens
  Light chain CDR3 for antibody 3076 (IGKV1-9)
QQLNGYPYT

SEQ ID NO: 6152 - protein, 15 aa, Homo sapiens
  Heavy chain CDR3 for antibody 3076 (IGHV1-46)
SREKYYGSGSYPFDY

SEQ ID NO: 6153 - protein, 9 aa, Homo sapiens
  Light chain CDR3 for antibody 3077 (IGKV1-9)
QQLNSYPYT

SEQ ID NO: 6154 - protein, 15 aa, Homo sapiens
  Heavy chain CDR3 for antibody 3077 (IGHV1-46)
AREKYYGAGSYPLDY

SEQ ID NO: 6155 - protein, 9 aa, Homo sapiens
  Light chain CDR3 for antibody 3078 (IGKV1-9)
QQLNSYPYT

SEQ ID NO: 6156 - protein, 11 aa, Homo sapiens
  Heavy chain CDR3 for antibody 3078 (IGHV3-33)
AREWQWLAPDY

SEQ ID NO: 6157 - protein, 9 aa, Homo sapiens
  Light chain CDR3 for antibody 3079 (IGKV1-39)
QQSFITPYT

SEQ ID NO: 6158 - protein, 20 aa, Homo sapiens
  Heavy chain CDR3 for antibody 3079 (IGHV4-59)
ARDRGSGSPPHYYYYYGMDV

SEQ ID NO: 6159 - protein, 9 aa, Homo sapiens
  Light chain CDR3 for antibody 3080 (IGKV1-9)
HQLNSYPYT

SEQ ID NO: 6160 - protein, 15 aa, Homo sapiens
  Heavy chain CDR3 for antibody 3080 (IGHV1-46)
AREKCYGSGSYAFDY

SEQ ID NO: 6161 - protein, 9 aa, Homo sapiens
  Light chain CDR3 for antibody 3081 (IGKV1-9)
QQFNSYPFT

SEQ ID NO: 6162 - protein, 10 aa, Homo sapiens
  Heavy chain CDR3 for antibody 3081 (IGHV3-33)
AREGTDGFDP

SEQ ID NO: 6163 - protein, 9 aa, Homo sapiens
  Light chain CDR3 for antibody 3082 (IGKV1-9)
QQFNSHPFT

SEQ ID NO: 6164 - protein, 15 aa, Homo sapiens
  Heavy chain CDR3 for antibody 3082 (IGHV1-46)
AREGLTGYYPNWFDP

SEQ ID NO: 6165 - protein, 9 aa, Homo sapiens
  Light chain CDR3 for antibody 3083 (IGKV1-9)
QQLNSYPYT

SEQ ID NO: 6166 - protein, 5 aa, Homo sapiens
  Heavy chain CDR3 for antibody 3083 (IGHV1-46)
AREKY

SEQ ID NO: 6167 - protein, 9 aa, Homo sapiens
  Light chain CDR3 for antibody 3084 (IGKV1D-17)
LQHNSYPYT

SEQ ID NO: 6168 - protein, 15 aa, Homo sapiens
  Heavy chain CDR3 for antibody 3084 (IGHV1-46)
AREGLTGYYPNWFDP

SEQ ID NO: 6169 - protein, 9 aa, Homo sapiens
  Light chain CDR3 for antibody 3085 (IGKV1-17)
LQHNSYPYT

SEQ ID NO: 6170 - protein, 15 aa, Homo sapiens
  Heavy chain CDR3 for antibody 3085 (IGHV4-59)
AREERYSGYDAGMDV

SEQ ID NO: 6171 - protein, 9 aa, Homo sapiens
  Light chain CDR3 for antibody 3086 (IGKV3-20)
QQYGSSPLT

SEQ ID NO: 6172 - protein, 15 aa, Homo sapiens
  Heavy chain CDR3 for antibody 3086 (IGHV1-46)
AREKYYGSGSYPFDY

SEQ ID NO: 6173 - protein, 9 aa, Homo sapiens
  Light chain CDR3 for antibody 3087 (IGKV1-9)
QQLNGYPYT

SEQ ID NO: 6174 - protein, 12 aa, Homo sapiens
  Heavy chain CDR3 for antibody 3087 (IGHV1-46)
ARGEAAAGHFDY

SEQ ID NO: 6175 - protein, 9 aa, Homo sapiens
  Light chain CDR3 for antibody 3088 (IGKV1-6)
LQDYNYPRT

SEQ ID NO: 6176 - protein, 9 aa, Homo sapiens
  Heavy chain CDR3 for antibody 3088 (IGHV1-46)
ARGPVAPSV

SEQ ID NO: 6177 - protein, 9 aa, Homo sapiens
  Light chain CDR3 for antibody 3089 (IGKV1-27)
QKYNSAPWT

SEQ ID NO: 6178 - protein, 15 aa, Homo sapiens
  Heavy chain CDR3 for antibody 3089 (IGHV1-46)
AREKYYGSGSYPFDY

SEQ ID NO: 6179 - protein, 9 aa, Homo sapiens
  Light chain CDR3 for antibody 3090 (IGKV1D-17)
LQHNSYPYT

SEQ ID NO: 6180 - protein, 13 aa, Homo sapiens
  Heavy chain CDR3 for antibody 3090 (IGHV3-33)
AREYCGGDCYGDY

SEQ ID NO: 6181 - protein, 9 aa, Homo sapiens
  Light chain CDR3 for antibody 3091 (IGKV1-9)
QQLNGYPYT

SEQ ID NO: 6182 - protein, 15 aa, Homo sapiens
  Heavy chain CDR3 for antibody 3091 (IGHV1-46)
AREKYYGSARYPFDY

SEQ ID NO: 6183 - protein, 9 aa, Homo sapiens
  Light chain CDR3 for antibody 3092 (IGKV6-21)
HQSSSLPYT

SEQ ID NO: 6184 - protein, 19 aa, Homo sapiens
  Heavy chain CDR3 for antibody 3092 (IGHV4-59)
AREVRDILTGYNYYYGMDV

SEQ ID NO: 6185 - protein, 9 aa, Homo sapiens
  Light chain CDR3 for antibody 3093 (IGKV1-9)
QQLNSYPLT

SEQ ID NO: 6186 - protein, 15 aa, Homo sapiens
  Heavy chain CDR3 for antibody 3093 (IGHV1-46)
ARENYYGSGSYPFDY

SEQ ID NO: 6187 - protein, 9 aa, Homo sapiens
  Light chain CDR3 for antibody 3094 (IGKV1-9)
QQLNSHPFT

SEQ ID NO: 6188 - protein, 17 aa, Homo sapiens
  Heavy chain CDR3 for antibody 3094 (IGHV3-33)
AREITMVRGDNYYGVDV

SEQ ID NO: 6189 - protein, 9 aa, Homo sapiens
  Light chain CDR3 for antibody 3095 (IGKV1D-13)
QQFNNYPRT

SEQ ID NO: 6190 - protein, 15 aa, Homo sapiens
  Heavy chain CDR3 for antibody 3095 (IGHV1-46)
AREKYYGSGSYPFDY

SEQ ID NO: 6191 - protein, 9 aa, Homo sapiens
  Light chain CDR3 for antibody 3096 (IGKV1-9)
QQLNSYPLT

SEQ ID NO: 6192 - protein, 17 aa, Homo sapiens
  Heavy chain CDR3 for antibody 3096 (IGHV3-33)
ARDPYDILTGYYYGMDV

SEQ ID NO: 6193 - protein, 9 aa, Homo sapiens
  Light chain CDR3 for antibody 3097 (IGKV1-9)
QQLNSYPFT

SEQ ID NO: 6194 - protein, 17 aa, Homo sapiens
  Heavy chain CDR3 for antibody 3097 (IGHV3-33)
ARELTMLRGDNYYGLDV

SEQ ID NO: 6195 - protein, 9 aa, Homo sapiens
  Light chain CDR3 for antibody 3098 (IGKV1-6)
LQDYNYPYT

SEQ ID NO: 6196 - protein, 13 aa, Homo sapiens
  Heavy chain CDR3 for antibody 3098 (IGHV1-24)
ATGDGSGSYRGDY

SEQ ID NO: 6197 - protein, 9 aa, Homo sapiens
  Light chain CDR3 for antibody 3099 (IGKV1-9)
QQLNSYPFT

SEQ ID NO: 6198 - protein, 17 aa, Homo sapiens
  Heavy chain CDR3 for antibody 3099 (IGHV3-33)
AREITMVRGDNYYGIDF

SEQ ID NO: 6199 - protein, 9 aa, Homo sapiens
  Light chain CDR3 for antibody 3100 (IGKV1-9)
QQLNSYPYT

SEQ ID NO: 6200 - protein, 17 aa, Homo sapiens
  Heavy chain CDR3 for antibody 3100 (IGHV3-33)
AREITMVRVDNYYGIDV

SEQ ID NO: 6201 - protein, 9 aa, Homo sapiens
  Light chain CDR3 for antibody 3101 (IGKV2D-28)
MQALQTPYT

SEQ ID NO: 6202 - protein, 20 aa, Homo sapiens
  Heavy chain CDR3 for antibody 3101 (IGHV4-59)
ARERSYGSGSYRYYYYGMDV

SEQ ID NO: 6203 - protein, 9 aa, Homo sapiens
  Light chain CDR3 for antibody 3102 (IGKV1-9)
QQLNSYPFT

SEQ ID NO: 6204 - protein, 13 aa, Homo sapiens
  Heavy chain CDR3 for antibody 3102 (IGHV3-33)
AREGPVWGMLFDI

SEQ ID NO: 6205 - protein, 9 aa, Homo sapiens
  Light chain CDR3 for antibody 3103 (IGKV1D-13)
QQFNNYPRT

SEQ ID NO: 6206 - protein, 10 aa, Homo sapiens
  Heavy chain CDR3 for antibody 3103 (IGHV3-33)
ARESVAGFDY

SEQ ID NO: 6207 - protein, 9 aa, Homo sapiens
  Light chain CDR3 for antibody 3104 (IGKV6-21)
HQSSSLPYT

SEQ ID NO: 6208 - protein, 16 aa, Homo sapiens
  Heavy chain CDR3 for antibody 3104 (IGHV1-18)
AREGDTMVRGVIAFAS

SEQ ID NO: 6209 - protein, 9 aa, Homo sapiens
  Light chain CDR3 for antibody 3105 (IGKV1-9)
QQLNSYPFT

SEQ ID NO: 6210 - protein, 17 aa, Homo sapiens
  Heavy chain CDR3 for antibody 3105 (IGHV3-33)
ARESTLVRGDNYYGLDV

SEQ ID NO: 6211 - protein, 9 aa, Homo sapiens
  Light chain CDR3 for antibody 3106 (IGKV1-9)
QQLNSYPYT

SEQ ID NO: 6212 - protein, 15 aa, Homo sapiens
  Heavy chain CDR3 for antibody 3106 (IGHV1-46)
AREKYYGAGSYPIDS

SEQ ID NO: 6213 - protein, 9 aa, Homo sapiens
  Light chain CDR3 for antibody 3107 (IGKV1-9)
QQLNSYPLT

SEQ ID NO: 6214 - protein, 15 aa, Homo sapiens
  Heavy chain CDR3 for antibody 3107 (IGHV1-46)
AREKYYGAGSYPFDY

SEQ ID NO: 6215 - protein, 9 aa, Homo sapiens
  Light chain CDR3 for antibody 3108 (IGKV1-9)
QQLNGYPYT

SEQ ID NO: 6216 - protein, 15 aa, Homo sapiens
  Heavy chain CDR3 for antibody 3108 (IGHV1-46)
ARENYYGSGSYPFDY

SEQ ID NO: 6217 - protein, 9 aa, Homo sapiens
  Light chain CDR3 for antibody 3109 (IGKV1-8)
QQYYSYPYT

SEQ ID NO: 6218 - protein, 17 aa, Homo sapiens
  Heavy chain CDR3 for antibody 3109 (IGHV3-33)
AREITMVRGDNYYGMDV

SEQ ID NO: 6219 - protein, 9 aa, Homo sapiens
  Light chain CDR3 for antibody 3110 (IGKV1-9)
QQLNSYPYT

SEQ ID NO: 6220 - protein, 15 aa, Homo sapiens
  Heavy chain CDR3 for antibody 3110 (IGHV1-46)
AREKYYGSGSYPFAS

SEQ ID NO: 6221 - protein, 9 aa, Homo sapiens
  Light chain CDR3 for antibody 3111 (IGKV3D-7)
QQDYNLPYT

SEQ ID NO: 6222 - protein, 15 aa, Homo sapiens
  Heavy chain CDR3 for antibody 3111 (IGHV3-33)
ARSPTVTSYYYGMDV

SEQ ID NO: 6223 - protein, 9 aa, Homo sapiens
  Light chain CDR3 for antibody 3112 (IGKV1-9)
QHLNSHPFT

SEQ ID NO: 6224 - protein, 17 aa, Homo sapiens
  Heavy chain CDR3 for antibody 3112 (IGHV3-33)
AREITMLRGDNYYGLDV

SEQ ID NO: 6225 - protein, 9 aa, Homo sapiens
  Light chain CDR3 for antibody 3113 (IGKV1D-16)
QQYNSYPRT

SEQ ID NO: 6226 - protein, 15 aa, Homo sapiens
  Heavy chain CDR3 for antibody 3113 (IGHV4-59)
ARERVYYGSGSYYDY

SEQ ID NO: 6227 - protein, 9 aa, Homo sapiens
  Light chain CDR3 for antibody 3114 (IGKV1-6)
LQDYNYPYT

SEQ ID NO: 6228 - protein, 17 aa, Homo sapiens
  Heavy chain CDR3 for antibody 3114 (IGHV3-33)
ARDRATVTLYYYYGMDV

SEQ ID NO: 6229 - protein, 9 aa, Homo sapiens
  Light chain CDR3 for antibody 3115 (IGKV1-9)
QQLNSYPYT

SEQ ID NO: 6230 - protein, 13 aa, Homo sapiens
  Heavy chain CDR3 for antibody 3115 (IGHV3-33)
ARVQLERRLAFDI

SEQ ID NO: 6231 - protein, 9 aa, Homo sapiens
  Light chain CDR3 for antibody 3116 (IGKV1-9)
LQDYNYPRT

SEQ ID NO: 6232 - protein, 17 aa, Homo sapiens
  Heavy chain CDR3 for antibody 3116 (IGHV3-33)
AREITMLRGDNYYGLDV

SEQ ID NO: 6233 - protein, 9 aa, Homo sapiens
  Light chain CDR3 for antibody 3117 (IGKV1-9)
QQLNSYPFT

SEQ ID NO: 6234 - protein, 13 aa, Homo sapiens
  Heavy chain CDR3 for antibody 3117 (IGHV1-18)
AREGGSFYVSFDY

SEQ ID NO: 6235 - protein, 9 aa, Homo sapiens
  Light chain CDR3 for antibody 3118 (IGKV1-9)
QQFNSYPFT

SEQ ID NO: 6236 - protein, 17 aa, Homo sapiens
  Heavy chain CDR3 for antibody 3118 (IGHV3-33)
AREITMVRGDNHYGMDV

SEQ ID NO: 6237 - protein, 9 aa, Homo sapiens
  Light chain CDR3 for antibody 3119 (IGKV1-9)
QQLNSYPYT

SEQ ID NO: 6238 - protein, 15 aa, Homo sapiens
  Heavy chain CDR3 for antibody 3119 (IGHV1-46)
AREKSYGSGSYPIDY

SEQ ID NO: 6239 - protein, 9 aa, Homo sapiens
  Light chain CDR3 for antibody 3120 (IGKV1-9)
QQLNSYPYT

SEQ ID NO: 6240 - protein, 17 aa, Homo sapiens
  Heavy chain CDR3 for antibody 3120 (IGHV3-33)
ARESTMARGDNYYGMDV

SEQ ID NO: 6241 - protein, 9 aa, Homo sapiens
  Light chain CDR3 for antibody 3121 (IGKV6-21)
HQSSSLPYT

SEQ ID NO: 6242 - protein, 14 aa, Homo sapiens
  Heavy chain CDR3 for antibody 3121 (IGHV1-18)
AREGYSGYLVSFDS

SEQ ID NO: 6243 - protein, 9 aa, Homo sapiens
  Light chain CDR3 for antibody 3122 (IGKV1-9)
QQLNSYPYT

SEQ ID NO: 6244 - protein, 15 aa, Homo sapiens
  Heavy chain CDR3 for antibody 3122 (IGHV1-46)
AIEKYYGSGTYPFDY

SEQ ID NO: 6245 - protein, 9 aa, Homo sapiens
  Light chain CDR3 for antibody 3123 (IGKV1D-16)
QQYNSYPRT

SEQ ID NO: 6246 - protein, 15 aa, Homo sapiens
  Heavy chain CDR3 for antibody 3123 (IGHV1-46)
AREKYYGSGSYPFDY

SEQ ID NO: 6247 - protein, 9 aa, Homo sapiens
  Light chain CDR3 for antibody 3124 (IGKV1-9)
QHLNSYPFT

SEQ ID NO: 6248 - protein, 17 aa, Homo sapiens
  Heavy chain CDR3 for antibody 3124 (IGHV3-33)
ARESTMVRGDNYDGMDV

SEQ ID NO: 6249 - protein, 9 aa, Homo sapiens
  Light chain CDR3 for antibody 3125 (IGKV6-21)
HQSSSLPYT

SEQ ID NO: 6250 - protein, 15 aa, Homo sapiens
  Heavy chain CDR3 for antibody 3125 (IGHV1-18)
AREGDIVATIIAFDI

SEQ ID NO: 6251 - protein, 9 aa, Homo sapiens
  Light chain CDR3 for antibody 3126 (IGKV1-9)
QQLNGFPYT

SEQ ID NO: 6252 - protein, 10 aa, Homo sapiens
  Heavy chain CDR3 for antibody 3126 (IGHV3-33)
ARESTDGMDV

SEQ ID NO: 6253 - protein, 9 aa, Homo sapiens
  Light chain CDR3 for antibody 3127 (IGKV1-17)
QQFNSHPFT

SEQ ID NO: 6254 - protein, 17 aa, Homo sapiens
  Heavy chain CDR3 for antibody 3127 (IGHV3-33)
AREIAMVRGDNYYGLDG

SEQ ID NO: 6255 - protein, 9 aa, Homo sapiens
  Light chain CDR3 for antibody 3128 (IGKV1-9)
QQLNSYPYT

SEQ ID NO: 6256 - protein, 15 aa, Homo sapiens
  Heavy chain CDR3 for antibody 3128 (IGHV1-46)
AREKCDGSGSYPFDY

SEQ ID NO: 6257 - protein, 9 aa, Homo sapiens
  Light chain CDR3 for antibody 3129 (IGKV1D-16)
QQYNSYPRT

SEQ ID NO: 6258 - protein, 11 aa, Homo sapiens
  Heavy chain CDR3 for antibody 3129 (IGHV1-8)
AREGSGSYLGY

SEQ ID NO: 6259 - protein, 9 aa, Homo sapiens
  Light chain CDR3 for antibody 3130 (IGKV1-9)
QQLNSYPFT

SEQ ID NO: 6260 - protein, 17 aa, Homo sapiens
  Heavy chain CDR3 for antibody 3130 (IGHV3-33)
AREITLIRGDNYYGIDV

SEQ ID NO: 6261 - protein, 9 aa, Homo sapiens
  Light chain CDR3 for antibody 3131 (IGKV6-21)
HQSSSLPYT

SEQ ID NO: 6262 - protein, 16 aa, Homo sapiens
  Heavy chain CDR3 for antibody 3131 (IGHV1-18)
AREGDTMVRGGNAFDS

SEQ ID NO: 6263 - protein, 9 aa, Homo sapiens
  Light chain CDR3 for antibody 3132 (IGKV1-9)
HQLNSYPYT

SEQ ID NO: 6264 - protein, 15 aa, Homo sapiens
  Heavy chain CDR3 for antibody 3132 (IGHV1-46)
AREKYYVSGSYPFDY

SEQ ID NO: 6265 - protein, 9 aa, Homo sapiens
  Light chain CDR3 for antibody 3133 (IGKV1-9)
QQLNSYPYT

SEQ ID NO: 6266 - protein, 13 aa, Homo sapiens
  Heavy chain CDR3 for antibody 3133 (IGHV3-33)
ARDYCGGDYYLDP

SEQ ID NO: 6267 - protein, 9 aa, Homo sapiens
  Light chain CDR3 for antibody 3134 (IGKV1D-17)
LQHTSYPYT

SEQ ID NO: 6268 - protein, 10 aa, Homo sapiens
  Heavy chain CDR3 for antibody 3134 (IGHV3-33)
SREALAGFDY

SEQ ID NO: 6269 - protein, 9 aa, Homo sapiens
  Light chain CDR3 for antibody 3135 (IGKV6-21)
HQSSSLPYT

SEQ ID NO: 6270 - protein, 16 aa, Homo sapiens
  Heavy chain CDR3 for antibody 3135 (IGHV1-18)
AREEDTMVPGVIAFYY

SEQ ID NO: 6271 - protein, 9 aa, Homo sapiens
  Light chain CDR3 for antibody 3136 (IGKV1-9)
QQLNSYPYT

SEQ ID NO: 6272 - protein, 17 aa, Homo sapiens
  Heavy chain CDR3 for antibody 3136 (IGHV1-46)
ARDGLLWFGELLSWFDP

SEQ ID NO: 6273 - protein, 9 aa, Homo sapiens
  Light chain CDR3 for antibody 3137 (IGKV1D-17)
QQLNSYPLT

SEQ ID NO: 6274 - protein, 15 aa, Homo sapiens
  Heavy chain CDR3 for antibody 3137 (IGHV1-46)
AREVYYGSGSYPFDY

SEQ ID NO: 6275 - protein, 9 aa, Homo sapiens
  Light chain CDR3 for antibody 3138 (IGKV3-20)
QQYGSSPLT

SEQ ID NO: 6276 - protein, 17 aa, Homo sapiens
  Heavy chain CDR3 for antibody 3138 (IGHV3-33)
AREITMVRGDNYYGMDV

SEQ ID NO: 6277 - protein, 9 aa, Homo sapiens
  Light chain CDR3 for antibody 3139 (IGKV1D-17)
LQHNSYPYT

SEQ ID NO: 6278 - protein, 13 aa, Homo sapiens
  Heavy chain CDR3 for antibody 3139 (IGHV1-18)
AREGGSYYVSFDY

SEQ ID NO: 6279 - protein, 9 aa, Homo sapiens
  Light chain CDR3 for antibody 3140 (IGKV1-9)
QQFNSHPFT

SEQ ID NO: 6280 - protein, 17 aa, Homo sapiens
  Heavy chain CDR3 for antibody 3140 (IGHV3-33)
AREITMIRGDNYDGMDF

SEQ ID NO: 6281 - protein, 9 aa, Homo sapiens
  Light chain CDR3 for antibody 3141 (IGKV1-9)
QQLNSYPYT

SEQ ID NO: 6282 - protein, 15 aa, Homo sapiens
  Heavy chain CDR3 for antibody 3141 (IGHV1-46)
AREKFHGSGSYPFDS

SEQ ID NO: 6283 - protein, 9 aa, Homo sapiens
  Light chain CDR3 for antibody 3142 (IGKV1-9)
QQLNSYPYT

SEQ ID NO: 6284 - protein, 15 aa, Homo sapiens
  Heavy chain CDR3 for antibody 3142 (IGHV1-46)
AREKYYGSDTYPFDY

SEQ ID NO: 6285 - protein, 9 aa, Homo sapiens
  Light chain CDR3 for antibody 3143 (IGKV1-6)
LQDYNCPHT

SEQ ID NO: 6286 - protein, 16 aa, Homo sapiens
  Heavy chain CDR3 for antibody 3143 (IGHV3-33)
ARREDRDYYYYYGMDV

SEQ ID NO: 6287 - protein, 9 aa, Homo sapiens
  Light chain CDR3 for antibody 3144 (IGKV1-9)
QQLNSYPYT

SEQ ID NO: 6288 - protein, 15 aa, Homo sapiens
  Heavy chain CDR3 for antibody 3144 (IGHV1-46)
SREKYYGSGTYPFAY

SEQ ID NO: 6289 - protein, 9 aa, Homo sapiens
  Light chain CDR3 for antibody 3145 (IGKV1-9)
QQLNSYPYT

SEQ ID NO: 6290 - protein, 15 aa, Homo sapiens
  Heavy chain CDR3 for antibody 3145 (IGHV1-46)
AREGLTGYYPNGFDA

SEQ ID NO: 6291 - protein, 9 aa, Homo sapiens
  Light chain CDR3 for antibody 3146 (IGKV1D-17)
LQHTSYPYT

SEQ ID NO: 6292 - protein, 10 aa, Homo sapiens
  Heavy chain CDR3 for antibody 3146 (IGHV3-33)
AREAVAGFDY

SEQ ID NO: 6293 - protein, 9 aa, Homo sapiens
  Light chain CDR3 for antibody 3147 (IGKV1-9)
QQLNGYPYT

SEQ ID NO: 6294 - protein, 15 aa, Homo sapiens
  Heavy chain CDR3 for antibody 3147 (IGHV1-46)
AREKYYGSGNYPFDY

SEQ ID NO: 6295 - protein, 9 aa, Homo sapiens
  Light chain CDR3 for antibody 3148 (IGKV1-9)
QQLNGYPYT

SEQ ID NO: 6296 - protein, 15 aa, Homo sapiens
  Heavy chain CDR3 for antibody 3148 (IGHV1-46)
AREKCYGAGSYPFDA

SEQ ID NO: 6297 - protein, 9 aa, Homo sapiens
  Light chain CDR3 for antibody 3149 (IGKV1-9)
QQLNSYPYT

SEQ ID NO: 6298 - protein, 10 aa, Homo sapiens
  Heavy chain CDR3 for antibody 3149 (IGHV1-46)
ARERWELFDY

SEQ ID NO: 6299 - protein, 9 aa, Homo sapiens
  Light chain CDR3 for antibody 3150 (IGKV1-9)
QQLNGYPYT

SEQ ID NO: 6300 - protein, 15 aa, Homo sapiens
  Heavy chain CDR3 for antibody 3150 (IGHV1-46)
ARENYYGSGSSPFDY

SEQ ID NO: 6301 - protein, 9 aa, Homo sapiens
  Light chain CDR3 for antibody 3151 (IGKV1-9)
QQLTSYPYT

SEQ ID NO: 6302 - protein, 17 aa, Homo sapiens
  Heavy chain CDR3 for antibody 3151 (IGHV3-33)
AREITMVRGDNYYGMDV

SEQ ID NO: 6303 - protein, 9 aa, Homo sapiens
  Light chain CDR3 for antibody 3152 (IGKV1-17)
LQHNSYPYT

SEQ ID NO: 6304 - protein, 17 aa, Homo sapiens
  Heavy chain CDR3 for antibody 3152 (IGHV3-33)
ARDYDILGYYYYYGMDV

SEQ ID NO: 6305 - protein, 9 aa, Homo sapiens
  Light chain CDR3 for antibody 3153 (IGKV1-9)
QQLNGFPYT

SEQ ID NO: 6306 - protein, 16 aa, Homo sapiens
  Heavy chain CDR3 for antibody 3153 (IGHV1-18)
AREGDTMVRGVIAFDF

SEQ ID NO: 6307 - protein, 9 aa, Homo sapiens
  Light chain CDR3 for antibody 3154 (IGKV1D-16)
QQYNSYPLT

SEQ ID NO: 6308 - protein, 15 aa, Homo sapiens
  Heavy chain CDR3 for antibody 3154 (IGHV4-39)
ARGAYYYDSGSPEDY

SEQ ID NO: 6309 - protein, 9 aa, Homo sapiens
  Light chain CDR3 for antibody 3155 (IGKV1-9)
QQLNGYPYT

SEQ ID NO: 6310 - protein, 15 aa, Homo sapiens
  Heavy chain CDR3 for antibody 3155 (IGHV1-46)
AREKSYVSGSYPFDY

SEQ ID NO: 6311 - protein, 9 aa, Homo sapiens
  Light chain CDR3 for antibody 3156 (IGKV6-21)
HQSSSLPYT

SEQ ID NO: 6312 - protein, 16 aa, Homo sapiens
  Heavy chain CDR3 for antibody 3156 (IGHV1-18)
AGEGDTMGRGVNAFDY

SEQ ID NO: 6313 - protein, 9 aa, Homo sapiens
  Light chain CDR3 for antibody 3157 (IGKV1-13)
QQYNSYPLT

SEQ ID NO: 6314 - protein, 20 aa, Homo sapiens
  Heavy chain CDR3 for antibody 3157 (IGHV3-11)
ARERGYYYGSVGDYYYGMDV

SEQ ID NO: 6315 - protein, 9 aa, Homo sapiens
  Light chain CDR3 for antibody 3158 (IGKV6-21)
HQSSSLPYT

SEQ ID NO: 6316 - protein, 13 aa, Homo sapiens
  Heavy chain CDR3 for antibody 3158 (IGHV4-59)
ARGGSYYYYGMDV

SEQ ID NO: 6317 - protein, 9 aa, Homo sapiens
  Light chain CDR3 for antibody 3159 (IGKV1-9)
QQLNSYPFT

SEQ ID NO: 6318 - protein, 17 aa, Homo sapiens
  Heavy chain CDR3 for antibody 3159 (IGHV3-48)
AREINMFRGDNSYGMDV

SEQ ID NO: 6319 - protein, 9 aa, Homo sapiens
  Light chain CDR3 for antibody 3160 (IGKV1-9)
QQLNGYPYT

SEQ ID NO: 6320 - protein, 16 aa, Homo sapiens
  Heavy chain CDR3 for antibody 3160 (IGHV3-33)
ARFGYSYGYDYYGMDV

SEQ ID NO: 6321 - protein, 9 aa, Homo sapiens
  Light chain CDR3 for antibody 3161 (IGKV1-9)
LQHNSHPFT

SEQ ID NO: 6322 - protein, 17 aa, Homo sapiens
  Heavy chain CDR3 for antibody 3161 (IGHV3-33)
AREITMVRGDNYYGLDV

SEQ ID NO: 6323 - protein, 9 aa, Homo sapiens
  Light chain CDR3 for antibody 3162 (IGKV1-9)
QQLNSYPFT

SEQ ID NO: 6324 - protein, 17 aa, Homo sapiens
  Heavy chain CDR3 for antibody 3162 (IGHV3-33)
AREITKFRGDSYYGMDV

SEQ ID NO: 6325 - protein, 9 aa, Homo sapiens
  Light chain CDR3 for antibody 3163 (IGKV1-9)
QQLNSYPYT

SEQ ID NO: 6326 - protein, 17 aa, Homo sapiens
  Heavy chain CDR3 for antibody 3163 (IGHV3-33)
AREITMVRGDNYYGMDA

SEQ ID NO: 6327 - protein, 9 aa, Homo sapiens
  Light chain CDR3 for antibody 3164 (IGKV6-21)
HQSSSLPYT

SEQ ID NO: 6328 - protein, 16 aa, Homo sapiens
  Heavy chain CDR3 for antibody 3164 (IGHV1-18)
AREGDTRVRGVIAFYS

SEQ ID NO: 6329 - protein, 9 aa, Homo sapiens
  Light chain CDR3 for antibody 3165 (IGKV1-9)
QQLNSYPYT

SEQ ID NO: 6330 - protein, 15 aa, Homo sapiens
  Heavy chain CDR3 for antibody 3165 (IGHV1-46)
AIYKYYGSDTYPFDY

SEQ ID NO: 6331 - protein, 9 aa, Homo sapiens
  Light chain CDR3 for antibody 3166 (IGKV1-9)
QQLDSHPFT

SEQ ID NO: 6332 - protein, 15 aa, Homo sapiens
  Heavy chain CDR3 for antibody 3166 (IGHV1-46)
AREKYHGSGSYPFDY

SEQ ID NO: 6333 - protein, 9 aa, Homo sapiens
  Light chain CDR3 for antibody 3167 (IGKV1-9)
QQLNGFPYT

SEQ ID NO: 6334 - protein, 15 aa, Homo sapiens
  Heavy chain CDR3 for antibody 3167 (IGHV1-46)
AREKSQGSGSYPFAY

SEQ ID NO: 6335 - protein, 9 aa, Homo sapiens
  Light chain CDR3 for antibody 3168 (IGKV1-9)
QQLNSYPLT

SEQ ID NO: 6336 - protein, 15 aa, Homo sapiens
  Heavy chain CDR3 for antibody 3168 (IGHV1-46)
AREKYYGSGSYPIEY

SEQ ID NO: 6337 - protein, 9 aa, Homo sapiens
  Light chain CDR3 for antibody 3169 (IGKV1-9)
QQLNSHPFT

SEQ ID NO: 6338 - protein, 17 aa, Homo sapiens
  Heavy chain CDR3 for antibody 3169 (IGHV3-33)
ARESTMVRGDNYYGLDS

SEQ ID NO: 6339 - protein, 9 aa, Homo sapiens
  Light chain CDR3 for antibody 3170 (IGKV1-9)
QQLNSYPYT

SEQ ID NO: 6340 - protein, 15 aa, Homo sapiens
  Heavy chain CDR3 for antibody 3170 (IGHV1-46)
SREKYYVSASYPFDY

SEQ ID NO: 6341 - protein, 9 aa, Homo sapiens
  Light chain CDR3 for antibody 3171 (IGKV1-9)
QQLNSYPFT

SEQ ID NO: 6342 - protein, 17 aa, Homo sapiens
  Heavy chain CDR3 for antibody 3171 (IGHV3-33)
AREITMVRGYNYYGIDA

SEQ ID NO: 6343 - protein, 9 aa, Homo sapiens
  Light chain CDR3 for antibody 3172 (IGKV6-21)
HQSSSLPYT

SEQ ID NO: 6344 - protein, 16 aa, Homo sapiens
  Heavy chain CDR3 for antibody 3172 (IGHV1-18)
AREGDTMVRGVIAIAY

SEQ ID NO: 6345 - protein, 9 aa, Homo sapiens
  Light chain CDR3 for antibody 3173 (IGKV1-9)
QQLNSYPFT

SEQ ID NO: 6346 - protein, 17 aa, Homo sapiens
  Heavy chain CDR3 for antibody 3173 (IGHV3-33)
ARESTRVRGDNYYGMDV

SEQ ID NO: 6347 - protein, 9 aa, Homo sapiens
  Light chain CDR3 for antibody 3174 (IGKV6-21)
HQSSSLPYT

SEQ ID NO: 6348 - protein, 10 aa, Homo sapiens
  Heavy chain CDR3 for antibody 3174 (IGHV3-33)
AREATEGFDY

SEQ ID NO: 6349 - protein, 9 aa, Homo sapiens
  Light chain CDR3 for antibody 3175 (IGKV1-12)
QQANSFPWT

SEQ ID NO: 6350 - protein, 19 aa, Homo sapiens
  Heavy chain CDR3 for antibody 3175 (IGHV1-18)
ARDHGYCSSTSCYRAWFDH

SEQ ID NO: 6351 - protein, 9 aa, Homo sapiens
  Light chain CDR3 for antibody 3176 (IGKV1-6)
LQDYNYPWT

SEQ ID NO: 6352 - protein, 20 aa, Homo sapiens
  Heavy chain CDR3 for antibody 3176 (IGHV3-48)
ARERYCDWLLGGSGSSGMDV

SEQ ID NO: 6353 - protein, 9 aa, Homo sapiens
  Light chain CDR3 for antibody 3177 (IGKV1-9)
QQLNSYPYT

SEQ ID NO: 6354 - protein, 12 aa, Homo sapiens
  Heavy chain CDR3 for antibody 3177 (IGHV3-33)
ARESVAGTEFDY

SEQ ID NO: 6355 - protein, 9 aa, Homo sapiens
  Light chain CDR3 for antibody 3178 (IGKV1-9)
QHLNSYPFT

SEQ ID NO: 6356 - protein, 15 aa, Homo sapiens
  Heavy chain CDR3 for antibody 3178 (IGHV3-33)
AREKYYGSGSYPFDY

SEQ ID NO: 6357 - protein, 9 aa, Homo sapiens
  Light chain CDR3 for antibody 3179 (IGKV1-9)
QQFNSHPFT

SEQ ID NO: 6358 - protein, 17 aa, Homo sapiens
  Heavy chain CDR3 for antibody 3179 (IGHV3-33)
AREITMVRGDNYDGMDD

SEQ ID NO: 6359 - protein, 9 aa, Homo sapiens
  Light chain CDR3 for antibody 3180 (IGKV1-9)
QQLNSYPFT

SEQ ID NO: 6360 - protein, 17 aa, Homo sapiens
  Heavy chain CDR3 for antibody 3180 (IGHV3-33)
AREITLVRGDNYYGLDV

SEQ ID NO: 6361 - protein, 9 aa, Homo sapiens
  Light chain CDR3 for antibody 3181 (IGKV6-21)
HQSSSLPYT

SEQ ID NO: 6362 - protein, 16 aa, Homo sapiens
  Heavy chain CDR3 for antibody 3181 (IGHV1-18)
AREGDTMGQGAIAFDY

SEQ ID NO: 6363 - protein, 9 aa, Homo sapiens
  Light chain CDR3 for antibody 3182 (IGKV3-20)
QQYGSSPLT

SEQ ID NO: 6364 - protein, 16 aa, Homo sapiens
  Heavy chain CDR3 for antibody 3182 (IGHV1-18)
AREGDTMVRGVIAFDY

SEQ ID NO: 6365 - protein, 9 aa, Homo sapiens
  Light chain CDR3 for antibody 3183 (IGKV1-9)
QQLNGYPYT

SEQ ID NO: 6366 - protein, 15 aa, Homo sapiens
  Heavy chain CDR3 for antibody 3183 (IGHV1-46)
AREKYDGSGSYPFEY

SEQ ID NO: 6367 - protein, 9 aa, Homo sapiens
  Light chain CDR3 for antibody 3184 (IGKV1D-17)
LQHNSYPYT

SEQ ID NO: 6368 - protein, 13 aa, Homo sapiens
  Heavy chain CDR3 for antibody 3184 (IGHV3-53)
ARDYCGGDCYPDP

SEQ ID NO: 6369 - protein, 9 aa, Homo sapiens
  Light chain CDR3 for antibody 3185 (IGKV6-21)
HQSSSLPYT

SEQ ID NO: 6370 - protein, 16 aa, Homo sapiens
  Heavy chain CDR3 for antibody 3185 (IGHV1-18)
AREGDTMVPAFIAFDY

SEQ ID NO: 6371 - protein, 9 aa, Homo sapiens
  Light chain CDR3 for antibody 3186 (IGKV1D-17)
LQHNSYPYT

SEQ ID NO: 6372 - protein, 10 aa, Homo sapiens
  Heavy chain CDR3 for antibody 3186 (IGHV3-33)
AREAVAGFDC

SEQ ID NO: 6373 - protein, 9 aa, Homo sapiens
  Light chain CDR3 for antibody 3187 (IGKV1-9)
QQLNSYPYT

SEQ ID NO: 6374 - protein, 15 aa, Homo sapiens
  Heavy chain CDR3 for antibody 3187 (IGHV1-46)
AREKDYGSGSYPIDY

SEQ ID NO: 6375 - protein, 9 aa, Homo sapiens
  Light chain CDR3 for antibody 3188 (IGKV1-9)
QQLNSYPFT

SEQ ID NO: 6376 - protein, 17 aa, Homo sapiens
  Heavy chain CDR3 for antibody 3188 (IGHV3-33)
ASEITVVRGDNYYGMDV

SEQ ID NO: 6377 - protein, 9 aa, Homo sapiens
  Light chain CDR3 for antibody 3189 (IGKV1-9)
QQFNSHPFT

SEQ ID NO: 6378 - protein, 17 aa, Homo sapiens
  Heavy chain CDR3 for antibody 3189 (IGHV3-33)
AREITMVRGYNYYGFDV

SEQ ID NO: 6379 - protein, 9 aa, Homo sapiens
  Light chain CDR3 for antibody 3190 (IGKV1-9)
QQLNSYPYT

SEQ ID NO: 6380 - protein, 15 aa, Homo sapiens
  Heavy chain CDR3 for antibody 3190 (IGHV1-46)
AREKFSGSGSYPFAY

SEQ ID NO: 6381 - protein, 9 aa, Homo sapiens
  Light chain CDR3 for antibody 3191 (IGKV1D-17)
LQHNSYPYT

SEQ ID NO: 6382 - protein, 10 aa, Homo sapiens
  Heavy chain CDR3 for antibody 3191 (IGHV3-33)
ARDAAAGFDY

SEQ ID NO: 6383 - protein, 9 aa, Homo sapiens
  Light chain CDR3 for antibody 3192 (IGKV1-9)
QQFNSYPFI

SEQ ID NO: 6384 - protein, 17 aa, Homo sapiens
  Heavy chain CDR3 for antibody 3192 (IGHV3-30)
AREITILRGDNYYALDV

SEQ ID NO: 6385 - protein, 9 aa, Homo sapiens
  Light chain CDR3 for antibody 3193 (IGKV1-9)
QQLNSYPFT

SEQ ID NO: 6386 - protein, 17 aa, Homo sapiens
  Heavy chain CDR3 for antibody 3193 (IGHV3-33)
ARAIAMFRGDNYYGMDV

SEQ ID NO: 6387 - protein, 9 aa, Homo sapiens
  Light chain CDR3 for antibody 3194 (IGKV1-9)
QQLNSYPYT

SEQ ID NO: 6388 - protein, 15 aa, Homo sapiens
  Heavy chain CDR3 for antibody 3194 (IGHV1-46)
ARAKFHGSGSYPFDY

SEQ ID NO: 6389 - protein, 9 aa, Homo sapiens
  Light chain CDR3 for antibody 3195 (IGKV6-21)
HQSSSLPYT

SEQ ID NO: 6390 - protein, 13 aa, Homo sapiens
  Heavy chain CDR3 for antibody 3195 (IGHV1-18)
ARDRVLGFGECDY

SEQ ID NO: 6391 - protein, 9 aa, Homo sapiens
  Light chain CDR3 for antibody 3196 (IGKV1D-17)
LQHNSYPYT

SEQ ID NO: 6392 - protein, 15 aa, Homo sapiens
  Heavy chain CDR3 for antibody 3196 (IGHV1-46)
AREKYYGAGSDPFDY

SEQ ID NO: 6393 - protein, 9 aa, Homo sapiens
  Light chain CDR3 for antibody 3197 (IGKV3D-7)
QQDYNYPYT

SEQ ID NO: 6394 - protein, 15 aa, Homo sapiens
  Heavy chain CDR3 for antibody 3197 (IGHV1-46)
AREKYYGSGSYPFDY

SEQ ID NO: 6395 - protein, 9 aa, Homo sapiens
  Light chain CDR3 for antibody 3198 (IGKV1-9)
QQLNSYPYT

SEQ ID NO: 6396 - protein, 15 aa, Homo sapiens
  Heavy chain CDR3 for antibody 3198 (IGHV1-46)
ERAKYYGSGSYPFDY

SEQ ID NO: 6397 - protein, 9 aa, Homo sapiens
  Light chain CDR3 for antibody 3199 (IGKV1-9)
QQLNSYPYT

SEQ ID NO: 6398 - protein, 16 aa, Homo sapiens
  Heavy chain CDR3 for antibody 3199 (IGHV3-11)
ARDRGGSYDYYYGMDV

SEQ ID NO: 6399 - protein, 9 aa, Homo sapiens
  Light chain CDR3 for antibody 3200 (IGKV1-6)
LQDYNYPWT

SEQ ID NO: 6400 - protein, 14 aa, Homo sapiens
  Heavy chain CDR3 for antibody 3200 (IGHV3-33)
AREITMVRADAFDI

SEQ ID NO: 6401 - protein, 9 aa, Homo sapiens
  Light chain CDR3 for antibody 3201 (IGKV1-9)
QQLNSYPST

SEQ ID NO: 6402 - protein, 17 aa, Homo sapiens
  Heavy chain CDR3 for antibody 3201 (IGHV3-33)
AREVTMVRGDNYDGMDV

SEQ ID NO: 6403 - protein, 9 aa, Homo sapiens
  Light chain CDR3 for antibody 3202 (IGKV1-9)
QQLNSYPYT

SEQ ID NO: 6404 - protein, 17 aa, Homo sapiens
  Heavy chain CDR3 for antibody 3202 (IGHV3-33)
SREITMVRGDNYYGMDV

SEQ ID NO: 6405 - protein, 9 aa, Homo sapiens
  Light chain CDR3 for antibody 3203 (IGKV1-9)
QQLNSYPFT

SEQ ID NO: 6406 - protein, 17 aa, Homo sapiens
  Heavy chain CDR3 for antibody 3203 (IGHV3-23)
AREIAMVRGDNYYGIDV

SEQ ID NO: 6407 - protein, 9 aa, Homo sapiens
  Light chain CDR3 for antibody 3204 (IGKV1-9)
QQLNSYPFT

SEQ ID NO: 6408 - protein, 17 aa, Homo sapiens
  Heavy chain CDR3 for antibody 3204 (IGHV3-33)
AREITKFRGDNYYGLAV

SEQ ID NO: 6409 - protein, 9 aa, Homo sapiens
  Light chain CDR3 for antibody 3205 (IGKV1-9)
QQLNSYPYT

SEQ ID NO: 6410 - protein, 15 aa, Homo sapiens
  Heavy chain CDR3 for antibody 3205 (IGHV1-46)
AREKSYGPGSYPCDY

SEQ ID NO: 6411 - protein, 9 aa, Homo sapiens
  Light chain CDR3 for antibody 3206 (IGKV1-9)
QQLNSYPFT

SEQ ID NO: 6412 - protein, 17 aa, Homo sapiens
  Heavy chain CDR3 for antibody 3206 (IGHV3-33)
AREITMVRGDNSYGMDA

SEQ ID NO: 6413 - protein, 9 aa, Homo sapiens
  Light chain CDR3 for antibody 3207 (IGKV1-9)
QQLNSYPFT

SEQ ID NO: 6414 - protein, 17 aa, Homo sapiens
  Heavy chain CDR3 for antibody 3207 (IGHV3-33)
ARQITMVWGYNYYGIDV

SEQ ID NO: 6415 - protein, 9 aa, Homo sapiens
  Light chain CDR3 for antibody 3208 (IGKV1-9)
QQFNSYPFT

SEQ ID NO: 6416 - protein, 17 aa, Homo sapiens
  Heavy chain CDR3 for antibody 3208 (IGHV3-33)
GREISMVRGDNYYGMDV

SEQ ID NO: 6417 - protein, 9 aa, Homo sapiens
  Light chain CDR3 for antibody 3209 (IGKV1-9)
QQLNSYQYT

SEQ ID NO: 6418 - protein, 15 aa, Homo sapiens
  Heavy chain CDR3 for antibody 3209 (IGHV1-46)
AREKSYGSASYPFDS

SEQ ID NO: 6419 - protein, 9 aa, Homo sapiens
  Light chain CDR3 for antibody 3210 (IGKV1-9)
QQLNSYPYT

SEQ ID NO: 6420 - protein, 15 aa, Homo sapiens
  Heavy chain CDR3 for antibody 3210 (IGHV1-46)
AREKYHGSGYYPIDY

SEQ ID NO: 6421 - protein, 9 aa, Homo sapiens
  Light chain CDR3 for antibody 3211 (IGKV1-9)
QQLNGYPYT

SEQ ID NO: 6422 - protein, 15 aa, Homo sapiens
  Heavy chain CDR3 for antibody 3211 (IGHV1-46)
AREKYYGAGSYPLDY

SEQ ID NO: 6423 - protein, 9 aa, Homo sapiens
  Light chain CDR3 for antibody 3212 (IGKV1-9)
QQLNSYPYT

SEQ ID NO: 6424 - protein, 17 aa, Homo sapiens
  Heavy chain CDR3 for antibody 3212 (IGHV3-30)
AREITMVRGDTYNGMDD

SEQ ID NO: 6425 - protein, 9 aa, Homo sapiens
  Light chain CDR3 for antibody 3213 (IGKV1-9)
QHLNSYPFT

SEQ ID NO: 6426 - protein, 17 aa, Homo sapiens
  Heavy chain CDR3 for antibody 3213 (IGHV3-33)
AREITMVRGDNYYGIDD

SEQ ID NO: 6427 - protein, 9 aa, Homo sapiens
  Light chain CDR3 for antibody 3214 (IGKV1-6)
LQDYNYPWT

SEQ ID NO: 6428 - protein, 15 aa, Homo sapiens
  Heavy chain CDR3 for antibody 3214 (IGHV1-46)
ARDLVVVPAAMGFDY

SEQ ID NO: 6429 - protein, 9 aa, Homo sapiens
  Light chain CDR3 for antibody 3215 (IGKV1-9)
QQLNGYPYT

SEQ ID NO: 6430 - protein, 17 aa, Homo sapiens
  Heavy chain CDR3 for antibody 3215 (IGHV3-33)
AREIALVRGDNYYGMDV

SEQ ID NO: 6431 - protein, 9 aa, Homo sapiens
  Light chain CDR3 for antibody 3216 (IGKV1-9)
QQLNSYPYT

SEQ ID NO: 6432 - protein, 15 aa, Homo sapiens
  Heavy chain CDR3 for antibody 3216 (IGHV1-46)
AREKYYGSGCYPFDF

SEQ ID NO: 6433 - protein, 9 aa, Homo sapiens
  Light chain CDR3 for antibody 3217 (IGKV1-9)
QQLNSYPFT

SEQ ID NO: 6434 - protein, 13 aa, Homo sapiens
  Heavy chain CDR3 for antibody 3217 (IGHV3-13)
ARGGWELFDAFDI

SEQ ID NO: 6435 - protein, 9 aa, Homo sapiens
  Light chain CDR3 for antibody 3218 (IGKV6-21)
HQSSSLPYT

SEQ ID NO: 6436 - protein, 15 aa, Homo sapiens
  Heavy chain CDR3 for antibody 3218 (IGHV1-46)
AREIFTGYYPNCFDP

SEQ ID NO: 6437 - protein, 9 aa, Homo sapiens
  Light chain CDR3 for antibody 3219 (IGKV6-21)
HQSSSLPYT

SEQ ID NO: 6438 - protein, 16 aa, Homo sapiens
  Heavy chain CDR3 for antibody 3219 (IGHV1-18)
GREGDTMGRGGIAFDY

SEQ ID NO: 6439 - protein, 9 aa, Homo sapiens
  Light chain CDR3 for antibody 3220 (IGKV1-9)
QQLNGYPYT

SEQ ID NO: 6440 - protein, 15 aa, Homo sapiens
  Heavy chain CDR3 for antibody 3220 (IGHV1-46)
AREKSYGSGSYPFAS

SEQ ID NO: 6441 - protein, 9 aa, Homo sapiens
  Light chain CDR3 for antibody 3221 (IGKV1-9)
QQLNSYPYT

SEQ ID NO: 6442 - protein, 15 aa, Homo sapiens
  Heavy chain CDR3 for antibody 3221 (IGHV1-46)
AREKCYGSGSYPLDY

SEQ ID NO: 6443 - protein, 9 aa, Homo sapiens
  Light chain CDR3 for antibody 3222 (IGKV6-21)
HQSSSLPYT

SEQ ID NO: 6444 - protein, 16 aa, Homo sapiens
  Heavy chain CDR3 for antibody 3222 (IGHV1-18)
ARKGNTMVQGIIAFDY

SEQ ID NO: 6445 - protein, 9 aa, Homo sapiens
  Light chain CDR3 for antibody 3223 (IGKV1-9)
QQLNSYPFT

SEQ ID NO: 6446 - protein, 17 aa, Homo sapiens
  Heavy chain CDR3 for antibody 3223 (IGHV3-30)
AREITLVRGDNYYAMDL

SEQ ID NO: 6447 - protein, 9 aa, Homo sapiens
  Light chain CDR3 for antibody 3224 (IGKV1-9)
QQLNGYPYT

SEQ ID NO: 6448 - protein, 15 aa, Homo sapiens
  Heavy chain CDR3 for antibody 3224 (IGHV1-46)
AREKSSGSGIYPFDY

SEQ ID NO: 6449 - protein, 9 aa, Homo sapiens
  Light chain CDR3 for antibody 3225 (IGKV1-9)
QQLNSYPYT

SEQ ID NO: 6450 - protein, 15 aa, Homo sapiens
  Heavy chain CDR3 for antibody 3225 (IGHV1-46)
ARDKYYGSGIYPFDY

SEQ ID NO: 6451 - protein, 9 aa, Homo sapiens
  Light chain CDR3 for antibody 3226 (IGKV6-21)
HQSSSLPYT

SEQ ID NO: 6452 - protein, 13 aa, Homo sapiens
  Heavy chain CDR3 for antibody 3226 (IGHV1-18)
ARECGSYYVAIDY

SEQ ID NO: 6453 - protein, 9 aa, Homo sapiens
  Light chain CDR3 for antibody 3227 (IGKV1-9)
QQLSSYPYT

SEQ ID NO: 6454 - protein, 15 aa, Homo sapiens
  Heavy chain CDR3 for antibody 3227 (IGHV1-46)
AREKYYGSWSYPIDY

SEQ ID NO: 6455 - protein, 9 aa, Homo sapiens
  Light chain CDR3 for antibody 3228 (IGKV1D-17)
QQLNGYPYT

SEQ ID NO: 6456 - protein, 10 aa, Homo sapiens
  Heavy chain CDR3 for antibody 3228 (IGHV3-33)
AREATEGFDY

SEQ ID NO: 6457 - protein, 9 aa, Homo sapiens
  Light chain CDR3 for antibody 3229 (IGKV1-9)
HQLNSYPYT

SEQ ID NO: 6458 - protein, 15 aa, Homo sapiens
  Heavy chain CDR3 for antibody 3229 (IGHV1-46)
AREKSYGSGSYPFAY

SEQ ID NO: 6459 - protein, 9 aa, Homo sapiens
  Light chain CDR3 for antibody 3230 (IGKV1-9)
QQLNSYPYT

SEQ ID NO: 6460 - protein, 13 aa, Homo sapiens
  Heavy chain CDR3 for antibody 3230 (IGHV1-18)
ARDRVRWFGECDY

SEQ ID NO: 6461 - protein, 9 aa, Homo sapiens
  Light chain CDR3 for antibody 3231 (IGKV1-9)
QQLNGFPYT

SEQ ID NO: 6462 - protein, 15 aa, Homo sapiens
  Heavy chain CDR3 for antibody 3231 (IGHV1-46)
AIEKYYGAGSYPIDY

SEQ ID NO: 6463 - protein, 9 aa, Homo sapiens
  Light chain CDR3 for antibody 3232 (IGKV6-21)
HQSSSLPYT

SEQ ID NO: 6464 - protein, 16 aa, Homo sapiens
  Heavy chain CDR3 for antibody 3232 (IGHV1-69)
AREGETMGRGVIAFDC

SEQ ID NO: 6465 - protein, 9 aa, Homo sapiens
  Light chain CDR3 for antibody 3233 (IGKV1-9)
QQFNSYPFT

SEQ ID NO: 6466 - protein, 17 aa, Homo sapiens
  Heavy chain CDR3 for antibody 3233 (IGHV3-33)
AREIAMVRGDSYYGLDV

SEQ ID NO: 6467 - protein, 9 aa, Homo sapiens
  Light chain CDR3 for antibody 3234 (IGKV1-16)
QQYNSYPYT

SEQ ID NO: 6468 - protein, 12 aa, Homo sapiens
  Heavy chain CDR3 for antibody 3234 (IGHV3-33)
ASSSNWADAFDI

SEQ ID NO: 6469 - protein, 9 aa, Homo sapiens
  Light chain CDR3 for antibody 3235 (IGKV1-9)
QQLNGYPYT

SEQ ID NO: 6470 - protein, 15 aa, Homo sapiens
  Heavy chain CDR3 for antibody 3235 (IGHV1-46)
AREKFYGSGSYPFAY

SEQ ID NO: 6471 - protein, 9 aa, Homo sapiens
  Light chain CDR3 for antibody 3236 (IGKV1-9)
QQLNSYPFT

SEQ ID NO: 6472 - protein, 17 aa, Homo sapiens
  Heavy chain CDR3 for antibody 3236 (IGHV3-33)
VREITMLRGDDYYGLDV

SEQ ID NO: 6473 - protein, 9 aa, Homo sapiens
  Light chain CDR3 for antibody 3237 (IGKV1-9)
QQINGYPYT

SEQ ID NO: 6474 - protein, 15 aa, Homo sapiens
  Heavy chain CDR3 for antibody 3237 (IGHV1-46)
ARKKYYGSWSYPFDY

SEQ ID NO: 6475 - protein, 9 aa, Homo sapiens
  Light chain CDR3 for antibody 3238 (IGKV1-9)
QQLNSYPFT

SEQ ID NO: 6476 - protein, 17 aa, Homo sapiens
  Heavy chain CDR3 for antibody 3238 (IGHV3-33)
AREITMVRGDDYSGMDF

SEQ ID NO: 6477 - protein, 9 aa, Homo sapiens
  Light chain CDR3 for antibody 3239 (IGKV1-9)
QQLNSYPYT

SEQ ID NO: 6478 - protein, 15 aa, Homo sapiens
  Heavy chain CDR3 for antibody 3239 (IGHV1-46)
AGEKYYGSGSYPFDS

SEQ ID NO: 6479 - protein, 9 aa, Homo sapiens
  Light chain CDR3 for antibody 3240 (IGKV6-21)
HQSSSLPYT

SEQ ID NO: 6480 - protein, 16 aa, Homo sapiens
  Heavy chain CDR3 for antibody 3240 (IGHV1-18)
SRERNTMVRGIIAFDY

SEQ ID NO: 6481 - protein, 9 aa, Homo sapiens
  Light chain CDR3 for antibody 3241 (IGKV1-9)
QQFNSYPFI

SEQ ID NO: 6482 - protein, 17 aa, Homo sapiens
  Heavy chain CDR3 for antibody 3241 (IGHV3-33)
AREITMIRGDNYYGMDV

SEQ ID NO: 6483 - protein, 9 aa, Homo sapiens
  Light chain CDR3 for antibody 3242 (IGKV1-9)
QQLNSYPYT

SEQ ID NO: 6484 - protein, 15 aa, Homo sapiens
  Heavy chain CDR3 for antibody 3242 (IGHV1-46)
ARENYYGSVSYPFDY

SEQ ID NO: 6485 - protein, 9 aa, Homo sapiens
  Light chain CDR3 for antibody 3243 (IGKV1-6)
LQDYNYPRT

SEQ ID NO: 6486 - protein, 16 aa, Homo sapiens
  Heavy chain CDR3 for antibody 3243 (IGHV3-33)
ARDSSGWYAYYYGMDV

SEQ ID NO: 6487 - protein, 9 aa, Homo sapiens
  Light chain CDR3 for antibody 3244 (IGKV1-9)
QQFNSYPFT

SEQ ID NO: 6488 - protein, 17 aa, Homo sapiens
  Heavy chain CDR3 for antibody 3244 (IGHV3-33)
AREITMVRGENYYGMDD

SEQ ID NO: 6489 - protein, 9 aa, Homo sapiens
  Light chain CDR3 for antibody 3245 (IGKV1-9)
QQLNSYPLT

SEQ ID NO: 6490 - protein, 15 aa, Homo sapiens
  Heavy chain CDR3 for antibody 3245 (IGHV1-46)
AREKYYGSGSYPFAD

SEQ ID NO: 6491 - protein, 9 aa, Homo sapiens
  Light chain CDR3 for antibody 3246 (IGKV1-9)
QQLNSYPLT

SEQ ID NO: 6492 - protein, 13 aa, Homo sapiens
  Heavy chain CDR3 for antibody 3246 (IGHV3-33)
ARDYCGGDCYTDP

SEQ ID NO: 6493 - protein, 9 aa, Homo sapiens
  Light chain CDR3 for antibody 3247 (IGKV1-9)
QQLNSHPFT

SEQ ID NO: 6494 - protein, 13 aa, Homo sapiens
  Heavy chain CDR3 for antibody 3247 (IGHV3-33)
ARDYCGGDCYPDP

SEQ ID NO: 6495 - protein, 9 aa, Homo sapiens
  Light chain CDR3 for antibody 3248 (IGKV1-9)
QQLNSYPYT

SEQ ID NO: 6496 - protein, 15 aa, Homo sapiens
  Heavy chain CDR3 for antibody 3248 (IGHV1-46)
AGEKYYSAGSDPFDY

SEQ ID NO: 6497 - protein, 9 aa, Homo sapiens
  Light chain CDR3 for antibody 3249 (IGKV1-9)
QQLNGFPYT

SEQ ID NO: 6498 - protein, 15 aa, Homo sapiens
  Heavy chain CDR3 for antibody 3249 (IGHV1-46)
AREKYYGSGSYPFEY

SEQ ID NO: 6499 - protein, 9 aa, Homo sapiens
  Light chain CDR3 for antibody 3250 (IGKV6-21)
HQSSSLPYT

SEQ ID NO: 6500 - protein, 16 aa, Homo sapiens
  Heavy chain CDR3 for antibody 3250 (IGHV1-18)
SREEETIVPGVIAFDY

SEQ ID NO: 6501 - protein, 9 aa, Homo sapiens
  Light chain CDR3 for antibody 3251 (IGKV1-9)
QQLNGYPYT

SEQ ID NO: 6502 - protein, 16 aa, Homo sapiens
  Heavy chain CDR3 for antibody 3251 (IGHV1-18)
SREGYTMVRGVIAFDY

SEQ ID NO: 6503 - protein, 9 aa, Homo sapiens
  Light chain CDR3 for antibody 3252 (IGKV1-9)
QQLNSYPYT

SEQ ID NO: 6504 - protein, 15 aa, Homo sapiens
  Heavy chain CDR3 for antibody 3252 (IGHV1-46)
AREKYYVSGSYPSEY

SEQ ID NO: 6505 - protein, 9 aa, Homo sapiens
  Light chain CDR3 for antibody 3253 (IGKV1-9)
QQLNSYPYT

SEQ ID NO: 6506 - protein, 15 aa, Homo sapiens
  Heavy chain CDR3 for antibody 3253 (IGHV1-46)
AIYKYYSSASYPFDY

SEQ ID NO: 6507 - protein, 9 aa, Homo sapiens
  Light chain CDR3 for antibody 3254 (IGKV1-9)
QQLNSYPYT

SEQ ID NO: 6508 - protein, 15 aa, Homo sapiens
  Heavy chain CDR3 for antibody 3254 (IGHV1-46)
EREKYNGSGSDPFDY

SEQ ID NO: 6509 - protein, 9 aa, Homo sapiens
  Light chain CDR3 for antibody 3255 (IGKV1-9)
QQLNSHPFT

SEQ ID NO: 6510 - protein, 17 aa, Homo sapiens
  Heavy chain CDR3 for antibody 3255 (IGHV3-11)
AREITMLRGDTYYGMDV

SEQ ID NO: 6511 - protein, 9 aa, Homo sapiens
  Light chain CDR3 for antibody 3256 (IGKV1D-17)
LQHNSYPYT

SEQ ID NO: 6512 - protein, 17 aa, Homo sapiens
  Heavy chain CDR3 for antibody 3256 (IGHV3-33)
VREISLVRGDNYYGLDV

SEQ ID NO: 6513 - protein, 9 aa, Homo sapiens
  Light chain CDR3 for antibody 3257 (IGKV1-9)
QQLNSYPFT

SEQ ID NO: 6514 - protein, 17 aa, Homo sapiens
  Heavy chain CDR3 for antibody 3257 (IGHV3-33)
ARESAMVRGENCYGMDV

SEQ ID NO: 6515 - protein, 9 aa, Homo sapiens
  Light chain CDR3 for antibody 3258 (IGKV1-9)
QQFNSYPFT

SEQ ID NO: 6516 - protein, 17 aa, Homo sapiens
  Heavy chain CDR3 for antibody 3258 (IGHV3-h)
AREIALVRGDNYYGMDD

SEQ ID NO: 6517 - protein, 9 aa, Homo sapiens
  Light chain CDR3 for antibody 3259 (IGKV3D-7)
QQDYNLPFT

SEQ ID NO: 6518 - protein, 16 aa, Homo sapiens
  Heavy chain CDR3 for antibody 3259 (IGHV1-18)
AREGETMVRGVFAFDY

SEQ ID NO: 6519 - protein, 9 aa, Homo sapiens
  Light chain CDR3 for antibody 3260 (IGKV1-9)
QQFNSHPFT

SEQ ID NO: 6520 - protein, 17 aa, Homo sapiens
  Heavy chain CDR3 for antibody 3260 (IGHV3-33)
ARESTRVRGDNYYGLDV

SEQ ID NO: 6521 - protein, 9 aa, Homo sapiens
  Light chain CDR3 for antibody 3261 (IGKV1D-17)
LQHNSYPYT

SEQ ID NO: 6522 - protein, 15 aa, Homo sapiens
  Heavy chain CDR3 for antibody 3261 (IGHV1-46)
AREKDHGSGSYPFDY

SEQ ID NO: 6523 - protein, 9 aa, Homo sapiens
  Light chain CDR3 for antibody 3262 (IGKV6-21)
HQSSSLPYT

SEQ ID NO: 6524 - protein, 16 aa, Homo sapiens
  Heavy chain CDR3 for antibody 3262 (IGHV1-18)
AREGDTMVRGCIAIEY

SEQ ID NO: 6525 - protein, 9 aa, Homo sapiens
  Light chain CDR3 for antibody 3263 (IGKV1D-17)
LQHNCYPYT

SEQ ID NO: 6526 - protein, 15 aa, Homo sapiens
  Heavy chain CDR3 for antibody 3263 (IGHV1-46)
AREKYYGSGSDPWDY

SEQ ID NO: 6527 - protein, 9 aa, Homo sapiens
  Light chain CDR3 for antibody 3264 (IGKV1-9)
QHLNSYPFT

SEQ ID NO: 6528 - protein, 17 aa, Homo sapiens
  Heavy chain CDR3 for antibody 3264 (IGHV3-33)
AREITIIRGDNYYGMDV

SEQ ID NO: 6529 - protein, 9 aa, Homo sapiens
  Light chain CDR3 for antibody 3265 (IGKV1-9)
QQLNGYPYT

SEQ ID NO: 6530 - protein, 15 aa, Homo sapiens
  Heavy chain CDR3 for antibody 3265 (IGHV1-46)
SREKYYVSASYPFYY

SEQ ID NO: 6531 - protein, 9 aa, Homo sapiens
  Light chain CDR3 for antibody 3266 (IGKV1-9)
QQLNSYPYT

SEQ ID NO: 6532 - protein, 15 aa, Homo sapiens
  Heavy chain CDR3 for antibody 3266 (IGHV1-46)
AREKYYGSGNYPIDY

SEQ ID NO: 6533 - protein, 9 aa, Homo sapiens
  Light chain CDR3 for antibody 3267 (IGKV1-9)
QQLNGYPYT

SEQ ID NO: 6534 - protein, 15 aa, Homo sapiens
  Heavy chain CDR3 for antibody 3267 (IGHV1-46)
AREKGYGPGSYAFDY

SEQ ID NO: 6535 - protein, 9 aa, Homo sapiens
  Light chain CDR3 for antibody 3268 (IGKV1-9)
QQLNSYPLT

SEQ ID NO: 6536 - protein, 15 aa, Homo sapiens
  Heavy chain CDR3 for antibody 3268 (IGHV1-46)
AREKYSGSGSYAFDY

SEQ ID NO: 6537 - protein, 9 aa, Homo sapiens
  Light chain CDR3 for antibody 3269 (IGKV1-9)
QQLNGFPYT

SEQ ID NO: 6538 - protein, 15 aa, Homo sapiens
  Heavy chain CDR3 for antibody 3269 (IGHV1-46)
AREKYYGSGSSPFAY

SEQ ID NO: 6539 - protein, 9 aa, Homo sapiens
  Light chain CDR3 for antibody 3270 (IGKV1-9)
QQLTSYPYT

SEQ ID NO: 6540 - protein, 15 aa, Homo sapiens
  Heavy chain CDR3 for antibody 3270 (IGHV1-46)
GREKSYGSGSYPSDY

SEQ ID NO: 6541 - protein, 9 aa, Homo sapiens
  Light chain CDR3 for antibody 3271 (IGKV1-9)
QQLNSYPLT

SEQ ID NO: 6542 - protein, 15 aa, Homo sapiens
  Heavy chain CDR3 for antibody 3271 (IGHV1-46)
AREGLSGYYPNCCDH

SEQ ID NO: 6543 - protein, 9 aa, Homo sapiens
  Light chain CDR3 for antibody 3272 (IGKV1-9)
QQLNGYPYT

SEQ ID NO: 6544 - protein, 15 aa, Homo sapiens
  Heavy chain CDR3 for antibody 3272 (IGHV1-46)
AREKYYGWGSYPLDY

SEQ ID NO: 6545 - protein, 9 aa, Homo sapiens
  Light chain CDR3 for antibody 3273 (IGKV1D-17)
LQHNSYPYT

SEQ ID NO: 6546 - protein, 10 aa, Homo sapiens
  Heavy chain CDR3 for antibody 3273 (IGHV3-33)
AREALAGIDS

SEQ ID NO: 6547 - protein, 9 aa, Homo sapiens
  Light chain CDR3 for antibody 3274 (IGKV1-9)
QQLNSYPLT

SEQ ID NO: 6548 - protein, 15 aa, Homo sapiens
  Heavy chain CDR3 for antibody 3274 (IGHV1-46)
AREKSYGSGTYPFAY

SEQ ID NO: 6549 - protein, 9 aa, Homo sapiens
  Light chain CDR3 for antibody 3275 (IGKV1D-17)
LQHNSYPYT

SEQ ID NO: 6550 - protein, 10 aa, Homo sapiens
  Heavy chain CDR3 for antibody 3275 (IGHV3-33)
ARESTYAIDF

SEQ ID NO: 6551 - protein, 9 aa, Homo sapiens
  Light chain CDR3 for antibody 3276 (IGKV6-21)
HQSSSLPYT

SEQ ID NO: 6552 - protein, 16 aa, Homo sapiens
  Heavy chain CDR3 for antibody 3276 (IGHV1-18)
AREGYTMVPGFIAFDY

SEQ ID NO: 6553 - protein, 9 aa, Homo sapiens
  Light chain CDR3 for antibody 3277 (IGKV1-9)
QQLNSYPYT

SEQ ID NO: 6554 - protein, 17 aa, Homo sapiens
  Heavy chain CDR3 for antibody 3277 (IGHV3-33)
AREIAMVRGYNYYGMDG

SEQ ID NO: 6555 - protein, 9 aa, Homo sapiens
  Light chain CDR3 for antibody 3278 (IGKV1-9)
QQLNSYPYT

SEQ ID NO: 6556 - protein, 15 aa, Homo sapiens
  Heavy chain CDR3 for antibody 3278 (IGHV1-46)
ARENYYGSGSSPIAY

SEQ ID NO: 6557 - protein, 9 aa, Homo sapiens
  Light chain CDR3 for antibody 3279 (IGKV1-9)
QQLNGYPYT

SEQ ID NO: 6558 - protein, 15 aa, Homo sapiens
  Heavy chain CDR3 for antibody 3279 (IGHV1-46)
GREKSYGSGSYPLDY

SEQ ID NO: 6559 - protein, 9 aa, Homo sapiens
  Light chain CDR3 for antibody 3280 (IGKV1-9)
QQLNSYPLT

SEQ ID NO: 6560 - protein, 17 aa, Homo sapiens
  Heavy chain CDR3 for antibody 3280 (IGHV3-33)
AREITMLRGDNYYGMAV

SEQ ID NO: 6561 - protein, 9 aa, Homo sapiens
  Light chain CDR3 for antibody 3281 (IGKV1-9)
QQLNSYPYT

SEQ ID NO: 6562 - protein, 16 aa, Homo sapiens
  Heavy chain CDR3 for antibody 3281 (IGHV1-69)
ATEGAVAGYYYYGMDV

SEQ ID NO: 6563 - protein, 9 aa, Homo sapiens
  Light chain CDR3 for antibody 3282 (IGKV6-21)
HQSSSLPYT

SEQ ID NO: 6564 - protein, 13 aa, Homo sapiens
  Heavy chain CDR3 for antibody 3282 (IGHV1-18)
AREGGNYIDSFAY

SEQ ID NO: 6565 - protein, 9 aa, Homo sapiens
  Light chain CDR3 for antibody 3283 (IGKV1-9)
QQLNGYPYT

SEQ ID NO: 6566 - protein, 15 aa, Homo sapiens
  Heavy chain CDR3 for antibody 3283 (IGHV1-46)
AREKYYGSGSYPFDC

SEQ ID NO: 6567 - protein, 9 aa, Homo sapiens
  Light chain CDR3 for antibody 3284 (IGKV1-6)
LQDYNYPRT

SEQ ID NO: 6568 - protein, 16 aa, Homo sapiens
  Heavy chain CDR3 for antibody 3284 (IGHV1-18)
AREGDTMVRGVIAFDY

SEQ ID NO: 6569 - protein, 9 aa, Homo sapiens
  Light chain CDR3 for antibody 3285 (IGKV1-6)
LQDYNYPYT

SEQ ID NO: 6570 - protein, 17 aa, Homo sapiens
  Heavy chain CDR3 for antibody 3285 (IGHV3-33)
AREIAMVRGDNYYGMDA

SEQ ID NO: 6571 - protein, 9 aa, Homo sapiens
  Light chain CDR3 for antibody 3286 (IGKV6-21)
HQSSSLPYT

SEQ ID NO: 6572 - protein, 13 aa, Homo sapiens
  Heavy chain CDR3 for antibody 3286 (IGHV1-2)
ARDDYGDYDYFDF

SEQ ID NO: 6573 - protein, 9 aa, Homo sapiens
  Light chain CDR3 for antibody 3287 (IGKV1-9)
QQLNSYPFT

SEQ ID NO: 6574 - protein, 17 aa, Homo sapiens
  Heavy chain CDR3 for antibody 3287 (IGHV3-33)
EREITMLRGDTYYGLDV

SEQ ID NO: 6575 - protein, 9 aa, Homo sapiens
  Light chain CDR3 for antibody 3288 (IGKV1D-16)
QQYNSYPRT

SEQ ID NO: 6576 - protein, 14 aa, Homo sapiens
  Heavy chain CDR3 for antibody 3288 (IGHV3-33)
ARDGRYDILTGGDY

SEQ ID NO: 6577 - protein, 9 aa, Homo sapiens
  Light chain CDR3 for antibody 3289 (IGKV1-9)
QQLNSYPYT

SEQ ID NO: 6578 - protein, 15 aa, Homo sapiens
  Heavy chain CDR3 for antibody 3289 (IGHV1-46)
AREKYYGSESYPLDY

SEQ ID NO: 6579 - protein, 8 aa, Homo sapiens
  Light chain CDR3 for antibody 3290 (IGKV3-20)
QQYGSSLT

SEQ ID NO: 6580 - protein, 15 aa, Homo sapiens
  Heavy chain CDR3 for antibody 3290 (IGHV3-33)
ARDRDYSYYYYGMDV

SEQ ID NO: 6581 - protein, 9 aa, Homo sapiens
  Light chain CDR3 for antibody 3291 (IGKV1D-17)
LQHNSYPYT

SEQ ID NO: 6582 - protein, 17 aa, Homo sapiens
  Heavy chain CDR3 for antibody 3291 (IGHV3-33)
ASEITLVRGDNYYAMDV

SEQ ID NO: 6583 - protein, 9 aa, Homo sapiens
  Light chain CDR3 for antibody 3292 (IGKV1-9)
QQLNSYPYT

SEQ ID NO: 6584 - protein, 17 aa, Homo sapiens
  Heavy chain CDR3 for antibody 3292 (IGHV3-33)
AREITMFRGDNYYAMNV

SEQ ID NO: 6585 - protein, 9 aa, Homo sapiens
  Light chain CDR3 for antibody 3293 (IGKV1-9)
QQLNSYPYT

SEQ ID NO: 6586 - protein, 15 aa, Homo sapiens
  Heavy chain CDR3 for antibody 3293 (IGHV1-46)
AREKYYCSENYAFDY

SEQ ID NO: 6587 - protein, 9 aa, Homo sapiens
  Light chain CDR3 for antibody 3294 (IGKV1-9)
QQLNSHPFT

SEQ ID NO: 6588 - protein, 11 aa, Homo sapiens
  Heavy chain CDR3 for antibody 3294 (IGHV1-8)
AREGAGSYLGY

SEQ ID NO: 6589 - protein, 9 aa, Homo sapiens
  Light chain CDR3 for antibody 3295 (IGKV1-9)
QQLNGYPYT

SEQ ID NO: 6590 - protein, 17 aa, Homo sapiens
  Heavy chain CDR3 for antibody 3295 (IGHV3-66)
AREITMLRGDTYYGMDV

SEQ ID NO: 6591 - protein, 9 aa, Homo sapiens
  Light chain CDR3 for antibody 3296 (IGKV6-21)
HQSSSLPYT

SEQ ID NO: 6592 - protein, 16 aa, Homo sapiens
  Heavy chain CDR3 for antibody 3296 (IGHV1-18)
AREEYTMVQAVIAFDY

SEQ ID NO: 6593 - protein, 9 aa, Homo sapiens
  Light chain CDR3 for antibody 3297 (IGKV1-9)
QHLNSYPFT

SEQ ID NO: 6594 - protein, 17 aa, Homo sapiens
  Heavy chain CDR3 for antibody 3297 (IGHV3-33)
AREINMVRGDDYYGMAV

SEQ ID NO: 6595 - protein, 8 aa, Homo sapiens
  Light chain CDR3 for antibody 3298 (IGKV3D-7)
QQDYNLFT

SEQ ID NO: 6596 - protein, 10 aa, Homo sapiens
  Heavy chain CDR3 for antibody 3298 (IGHV1-46)
AREWESYFDY

SEQ ID NO: 6597 - protein, 9 aa, Homo sapiens
  Light chain CDR3 for antibody 3299 (IGKV1-9)
LQLNGFPYT

SEQ ID NO: 6598 - protein, 15 aa, Homo sapiens
  Heavy chain CDR3 for antibody 3299 (IGHV1-46)
AREKCYGSGSYPFDY

SEQ ID NO: 6599 - protein, 9 aa, Homo sapiens
  Light chain CDR3 for antibody 3300 (IGKV1D-17)
QQLNGFPYT

SEQ ID NO: 6600 - protein, 15 aa, Homo sapiens
  Heavy chain CDR3 for antibody 3300 (IGHV1-46)
AREKYHGAGSDPFDY

SEQ ID NO: 6601 - protein, 9 aa, Homo sapiens
  Light chain CDR3 for antibody 3301 (IGKV1-9)
QQLNGYPYT

SEQ ID NO: 6602 - protein, 15 aa, Homo sapiens
  Heavy chain CDR3 for antibody 3301 (IGHV1-46)
AREKNYGSGSYPFDY

SEQ ID NO: 6603 - protein, 9 aa, Homo sapiens
  Light chain CDR3 for antibody 3302 (IGKV1-9)
QQLNGYPYT

SEQ ID NO: 6604 - protein, 16 aa, Homo sapiens
  Heavy chain CDR3 for antibody 3302 (IGHVVISTA32)
AREGEAMVRGVIALDY

SEQ ID NO: 6605 - protein, 9 aa, Homo sapiens
  Light chain CDR3 for antibody 3303 (IGKV1-9)
QQLNSYPFT

SEQ ID NO: 6606 - protein, 17 aa, Homo sapiens
  Heavy chain CDR3 for antibody 3303 (IGHV3-23)
SSEITMVRGDNYYAMDV

SEQ ID NO: 6607 - protein, 9 aa, Homo sapiens
  Light chain CDR3 for antibody 3304 (IGKV1-9)
QQLNSYPYT

SEQ ID NO: 6608 - protein, 15 aa, Homo sapiens
  Heavy chain CDR3 for antibody 3304 (IGHV1-46)
AREKYYGSGSYAIDY

SEQ ID NO: 6609 - protein, 9 aa, Homo sapiens
  Light chain CDR3 for antibody 3305 (IGKV1-9)
QQLNSYPFT

SEQ ID NO: 6610 - protein, 20 aa, Homo sapiens
  Heavy chain CDR3 for antibody 3305 (IGHV4-39)
ARRGDYYGSGSYYNIVYFDY

SEQ ID NO: 6611 - protein, 9 aa, Homo sapiens
  Light chain CDR3 for antibody 3306 (IGKV1-9)
QQLNSYPLT

SEQ ID NO: 6612 - protein, 15 aa, Homo sapiens
  Heavy chain CDR3 for antibody 3306 (IGHV1-46)
AREDLAGYYTNWFDS

SEQ ID NO: 6613 - protein, 9 aa, Homo sapiens
  Light chain CDR3 for antibody 3307 (IGKV1-9)
QQLNSYPFT

SEQ ID NO: 6614 - protein, 17 aa, Homo sapiens
  Heavy chain CDR3 for antibody 3307 (IGHV3-33)
AREITRFRGDNYYGMDF

SEQ ID NO: 6615 - protein, 9 aa, Homo sapiens
  Light chain CDR3 for antibody 3308 (IGKV6-21)
HQSSSLPYT

SEQ ID NO: 6616 - protein, 16 aa, Homo sapiens
  Heavy chain CDR3 for antibody 3308 (IGHV1-2)
AREADTMVPRLIAFDY

SEQ ID NO: 6617 - protein, 9 aa, Homo sapiens
  Light chain CDR3 for antibody 3309 (IGKV1-9)
QQLNSYPLT

SEQ ID NO: 6618 - protein, 15 aa, Homo sapiens
  Heavy chain CDR3 for antibody 3309 (IGHV1-46)
AIDGLAGYYPNGFDS

SEQ ID NO: 6619 - protein, 9 aa, Homo sapiens
  Light chain CDR3 for antibody 3310 (IGKV1-9)
QQLNSYPYT

SEQ ID NO: 6620 - protein, 15 aa, Homo sapiens
  Heavy chain CDR3 for antibody 3310 (IGHV1-46)
AREKYYGAGRSPFDY

SEQ ID NO: 6621 - protein, 9 aa, Homo sapiens
  Light chain CDR3 for antibody 3311 (IGKV1-9)
QQLNSYPLT

SEQ ID NO: 6622 - protein, 17 aa, Homo sapiens
  Heavy chain CDR3 for antibody 3311 (IGHV3-33)
AREITMLRGYNYYGMDF

SEQ ID NO: 6623 - protein, 9 aa, Homo sapiens
  Light chain CDR3 for antibody 3312 (IGKV1-9)
HQLNSYPYT

SEQ ID NO: 6624 - protein, 15 aa, Homo sapiens
  Heavy chain CDR3 for antibody 3312 (IGHV1-46)
AREQYYGSGIYPFDY

SEQ ID NO: 6625 - protein, 9 aa, Homo sapiens
  Light chain CDR3 for antibody 3313 (IGKV1-9)
QQLNSYPYT

SEQ ID NO: 6626 - protein, 15 aa, Homo sapiens
  Heavy chain CDR3 for antibody 3313 (IGHV1-46)
AIDKYYGSPSYPFDY

SEQ ID NO: 6627 - protein, 9 aa, Homo sapiens
  Light chain CDR3 for antibody 3314 (IGKV1-9)
QQLNSYPYT

SEQ ID NO: 6628 - protein, 15 aa, Homo sapiens
  Heavy chain CDR3 for antibody 3314 (IGHV1-46)
AGEKCYGSASYPFDY

SEQ ID NO: 6629 - protein, 9 aa, Homo sapiens
  Light chain CDR3 for antibody 3315 (IGKV1-9)
QQLNSYPLT

SEQ ID NO: 6630 - protein, 15 aa, Homo sapiens
  Heavy chain CDR3 for antibody 3315 (IGHV1-46)
AREGLTGYYPNCIDA

SEQ ID NO: 6631 - protein, 9 aa, Homo sapiens
  Light chain CDR3 for antibody 3316 (IGKV1D-17)
LQHNSYPYT

SEQ ID NO: 6632 - protein, 10 aa, Homo sapiens
  Heavy chain CDR3 for antibody 3316 (IGHV3-33)
ARESTDGMDV

SEQ ID NO: 6633 - protein, 9 aa, Homo sapiens
  Light chain CDR3 for antibody 3317 (IGKV1-9)
QQLNSYPFT

SEQ ID NO: 6634 - protein, 17 aa, Homo sapiens
  Heavy chain CDR3 for antibody 3317 (IGHV3-33)
AREITMVRGDNYYGMDV

SEQ ID NO: 6635 - protein, 9 aa, Homo sapiens
  Light chain CDR3 for antibody 3318 (IGKV1-9)
QQLNSYPYT

SEQ ID NO: 6636 - protein, 15 aa, Homo sapiens
  Heavy chain CDR3 for antibody 3318 (IGHV1-46)
AREKYYGSGSYPFDY

SEQ ID NO: 6637 - protein, 9 aa, Homo sapiens
  Light chain CDR3 for antibody 3319 (IGKV1D-17)
LQHNSYPYT

SEQ ID NO: 6638 - protein, 10 aa, Homo sapiens
  Heavy chain CDR3 for antibody 3319 (IGHV3-33)
ARESVAGFDY

SEQ ID NO: 6639 - protein, 9 aa, Homo sapiens
  Light chain CDR3 for antibody 3320 (IGKV1-9)
QQLNSHPFT

SEQ ID NO: 6640 - protein, 17 aa, Homo sapiens
  Heavy chain CDR3 for antibody 3320 (IGHV3-33)
AREVTMVRGDNYYGLDV

SEQ ID NO: 6641 - protein, 9 aa, Homo sapiens
  Light chain CDR3 for antibody 3321 (IGKV1-9)
QQFNSHPFT

SEQ ID NO: 6642 - protein, 17 aa, Homo sapiens
  Heavy chain CDR3 for antibody 3321 (IGHV3-33)
AREITMLRGDNYYGLDV

SEQ ID NO: 6643 - protein, 9 aa, Homo sapiens
  Light chain CDR3 for antibody 3322 (IGKV1D-17)
LQHNSYPYT

SEQ ID NO: 6644 - protein, 17 aa, Homo sapiens
  Heavy chain CDR3 for antibody 3322 (IGHV3-33)
AREITMVRGDNYYGMDV

SEQ ID NO: 6645 - protein, 9 aa, Homo sapiens
  Light chain CDR3 for antibody 3323 (IGKV1-9)
QQLNSYPFT

SEQ ID NO: 6646 - protein, 10 aa, Homo sapiens
  Heavy chain CDR3 for antibody 3323 (IGHV3-33)
ARESTDGMDV

SEQ ID NO: 6647 - protein, 9 aa, Homo sapiens
  Light chain CDR3 for antibody 3324 (IGKV1D-17)
LQHNSYPWT

SEQ ID NO: 6648 - protein, 9 aa, Homo sapiens
  Heavy chain CDR3 for antibody 3324 (IGHV3-33)
AREGAGVDY

SEQ ID NO: 6649 - protein, 9 aa, Homo sapiens
  Light chain CDR3 for antibody 3325 (IGKV1D-17)
LQHNSYPYT

SEQ ID NO: 6650 - protein, 10 aa, Homo sapiens
  Heavy chain CDR3 for antibody 3325 (IGHV3-33)
AREGRTGFDY

SEQ ID NO: 6651 - protein, 9 aa, Homo sapiens
  Light chain CDR3 for antibody 3326 (IGKV3D-20)
QQYGSSPWT

SEQ ID NO: 6652 - protein, 19 aa, Homo sapiens
  Heavy chain CDR3 for antibody 3326 (IGHV1-18)
ARDHGYCSSTSCYRAWFDP

SEQ ID NO: 6653 - protein, 9 aa, Homo sapiens
  Light chain CDR3 for antibody 3327 (IGKV1-9)
QQLISYPYT

SEQ ID NO: 6654 - protein, 15 aa, Homo sapiens
  Heavy chain CDR3 for antibody 3327 (IGHV1-46)
AREKYYGSGSYPFDS

SEQ ID NO: 6655 - protein, 9 aa, Homo sapiens
  Light chain CDR3 for antibody 3328 (IGKV3D-20)
QQANSFPWT

SEQ ID NO: 6656 - protein, 19 aa, Homo sapiens
  Heavy chain CDR3 for antibody 3328 (IGHV1-18)
ARDHGYCSSTSCYRAWFDP

SEQ ID NO: 6657 - protein, 9 aa, Homo sapiens
  Light chain CDR3 for antibody 3329 (IGKV1-9)
QHLNSHPFT

SEQ ID NO: 6658 - protein, 17 aa, Homo sapiens
  Heavy chain CDR3 for antibody 3329 (IGHV3-33)
AREITMVRGDNYYGMDV

SEQ ID NO: 6659 - protein, 9 aa, Homo sapiens
  Light chain CDR3 for antibody 3330 (IGKV6-21)
HQSSSLPYT

SEQ ID NO: 6660 - protein, 16 aa, Homo sapiens
  Heavy chain CDR3 for antibody 3330 (IGHV1-18)
AREGDTMVRGVIAFDY

SEQ ID NO: 6661 - protein, 9 aa, Homo sapiens
  Light chain CDR3 for antibody 3331 (IGKV1D-17)
LQHNSYPYT

SEQ ID NO: 6662 - protein, 15 aa, Homo sapiens
  Heavy chain CDR3 for antibody 3331 (IGHV1-46)
AREKYYGSGSYPFDS

SEQ ID NO: 6663 - protein, 9 aa, Homo sapiens
  Light chain CDR3 for antibody 3332 (IGKV1-9)
QQLNSYPFT

SEQ ID NO: 6664 - protein, 10 aa, Homo sapiens
  Heavy chain CDR3 for antibody 3332 (IGHV3-33)
ARESVAGFDY

SEQ ID NO: 6665 - protein, 9 aa, Homo sapiens
  Light chain CDR3 for antibody 3333 (IGKV1-9)
HQLISYPYT

SEQ ID NO: 6666 - protein, 15 aa, Homo sapiens
  Heavy chain CDR3 for antibody 3333 (IGHV1-46)
AREKYYGSGSYPFDY

SEQ ID NO: 6667 - protein, 9 aa, Homo sapiens
  Light chain CDR3 for antibody 3334 (IGKV1-6)
QQYYSYPRT

SEQ ID NO: 6668 - protein, 11 aa, Homo sapiens
  Heavy chain CDR3 for antibody 3334 (IGHV4-39)
ARATMVRNFDY

SEQ ID NO: 6669 - protein, 9 aa, Homo sapiens
  Light chain CDR3 for antibody 3335 (IGKV1-8)
QQYYSYPLT

SEQ ID NO: 6670 - protein, 14 aa, Homo sapiens
  Heavy chain CDR3 for antibody 3335 (IGHV3-23)
AKNRAVAGLNWFDP

SEQ ID NO: 6671 - protein, 9 aa, Homo sapiens
  Light chain CDR3 for antibody 3336 (IGKV1-9)
QQLNSHPFT

SEQ ID NO: 6672 - protein, 15 aa, Homo sapiens
  Heavy chain CDR3 for antibody 3336 (IGHV1-46)
AREKYYGSGSYPFDS

SEQ ID NO: 6673 - protein, 9 aa, Homo sapiens
  Light chain CDR3 for antibody 3337 (IGKV1-9)
QQFNSYPFT

SEQ ID NO: 6674 - protein, 17 aa, Homo sapiens
  Heavy chain CDR3 for antibody 3337 (IGHV3-33)
AREITLVRGDNYYGMDV

SEQ ID NO: 6675 - protein, 9 aa, Homo sapiens
  Light chain CDR3 for antibody 3338 (IGKV3-20)
QQYGSSPLT

SEQ ID NO: 6676 - protein, 8 aa, Homo sapiens
  Heavy chain CDR3 for antibody 3338 (IGHV4-59)
ASGACFDY

SEQ ID NO: 6677 - protein, 9 aa, Homo sapiens
  Light chain CDR3 for antibody 3339 (IGKV1-9)
HQLNSYPYT

SEQ ID NO: 6678 - protein, 15 aa, Homo sapiens
  Heavy chain CDR3 for antibody 3339 (IGHV1-46)
AREKYHGSGSYPFDY

SEQ ID NO: 6679 - protein, 9 aa, Homo sapiens
  Light chain CDR3 for antibody 3340 (IGKV1-27)
QKYNSAPLT

SEQ ID NO: 6680 - protein, 13 aa, Homo sapiens
  Heavy chain CDR3 for antibody 3340 (IGHV3-33)
ARDWYYGSGSPYY

SEQ ID NO: 6681 - protein, 9 aa, Homo sapiens
  Light chain CDR3 for antibody 3341 (IGKV3D-20)
QHYGSSPWT

SEQ ID NO: 6682 - protein, 11 aa, Homo sapiens
  Heavy chain CDR3 for antibody 3341 (IGHV3-33)
ARDRRVGATDY

SEQ ID NO: 6683 - protein, 9 aa, Homo sapiens
  Light chain CDR3 for antibody 3342 (IGKV1-16)
QQYNSYPWT

SEQ ID NO: 6684 - protein, 14 aa, Homo sapiens
  Heavy chain CDR3 for antibody 3342 (IGHV4-34)
ARVLLWFGMGWFDP

SEQ ID NO: 6685 - protein, 9 aa, Homo sapiens
  Light chain CDR3 for antibody 3343 (IGKV1-9)
QQFNSYPFT

SEQ ID NO: 6686 - protein, 17 aa, Homo sapiens
  Heavy chain CDR3 for antibody 3343 (IGHV3-33)
GREITMVRGDNYYGMDV

SEQ ID NO: 6687 - protein, 9 aa, Homo sapiens
  Light chain CDR3 for antibody 3344 (IGKV3-15)
QQYNNWPRT

SEQ ID NO: 6688 - protein, 16 aa, Homo sapiens
  Heavy chain CDR3 for antibody 3344 (IGHV3-33)
ARDRDIVATGEYYFDY

SEQ ID NO: 6689 - protein, 9 aa, Homo sapiens
  Light chain CDR3 for antibody 3345 (IGKV1-12)
QQANSFPWT

SEQ ID NO: 6690 - protein, 13 aa, Homo sapiens
  Heavy chain CDR3 for antibody 3345 (IGHV1-18)
AREGGSYYVSFDY

SEQ ID NO: 6691 - protein, 9 aa, Homo sapiens
  Light chain CDR3 for antibody 3346 (IGKV1-9)
QQLNSYPFT

SEQ ID NO: 6692 - protein, 17 aa, Homo sapiens
  Heavy chain CDR3 for antibody 3346 (IGHV3-33)
VREITMVRGDNYYGLDV

SEQ ID NO: 6693 - protein, 9 aa, Homo sapiens
  Light chain CDR3 for antibody 3347 (IGKV1D-17)
LQHNSYPYT

SEQ ID NO: 6694 - protein, 12 aa, Homo sapiens
  Heavy chain CDR3 for antibody 3347 (IGHV4-39)
ARQGSYLSWFDP

SEQ ID NO: 6695 - protein, 9 aa, Homo sapiens
  Light chain CDR3 for antibody 3348 (IGKV1D-16)
QQYNSYPPT

SEQ ID NO: 6696 - protein, 13 aa, Homo sapiens
  Heavy chain CDR3 for antibody 3348 (IGHV1-24)
ATTYSGYAYYFDY

SEQ ID NO: 6697 - protein, 9 aa, Homo sapiens
  Light chain CDR3 for antibody 3349 (IGKV1D-17)
LQHNSYPYT

SEQ ID NO: 6698 - protein, 10 aa, Homo sapiens
  Heavy chain CDR3 for antibody 3349 (IGHV3-33)
ARESGEGFDY

SEQ ID NO: 6699 - protein, 9 aa, Homo sapiens
  Light chain CDR3 for antibody 3350 (IGKV1-8)
QQYYSYPLT

SEQ ID NO: 6700 - protein, 14 aa, Homo sapiens
  Heavy chain CDR3 for antibody 3350 (IGHV3-23)
AKDRAVAGTYYFDY

SEQ ID NO: 6701 - protein, 8 aa, Homo sapiens
  Light chain CDR3 for antibody 3351 (IGKV1-6)
LQDYNYPT

SEQ ID NO: 6702 - protein, 13 aa, Homo sapiens
  Heavy chain CDR3 for antibody 3351 (IGHV1-24)
ATTYSGYAYYFDY

SEQ ID NO: 6703 - protein, 9 aa, Homo sapiens
  Light chain CDR3 for antibody 3352 (IGKV1-6)
LQDYNYPYT

SEQ ID NO: 6704 - protein, 14 aa, Homo sapiens
  Heavy chain CDR3 for antibody 3352 (IGHV1-8)
ARGPTVRGVIRFDY

SEQ ID NO: 6705 - protein, 9 aa, Homo sapiens
  Light chain CDR3 for antibody 3353 (IGKV1-9)
QQLNSYPFT

SEQ ID NO: 6706 - protein, 9 aa, Homo sapiens
  Heavy chain CDR3 for antibody 3353 (IGHV3-33)
AREGAGVDY

SEQ ID NO: 6707 - protein, 9 aa, Homo sapiens
  Light chain CDR3 for antibody 3354 (IGKV1-9)
QQLNSYPFT

SEQ ID NO: 6708 - protein, 10 aa, Homo sapiens
  Heavy chain CDR3 for antibody 3354 (IGHV3-33)
AREGRTGFDY

SEQ ID NO: 6709 - protein, 9 aa, Homo sapiens
  Light chain CDR3 for antibody 3355 (IGKV3D-20)
QQYGSSPRT

SEQ ID NO: 6710 - protein, 15 aa, Homo sapiens
  Heavy chain CDR3 for antibody 3355 (IGHV1-18)
ARDYDILTGYYPLDY

SEQ ID NO: 6711 - protein, 9 aa, Homo sapiens
  Light chain CDR3 for antibody 3356 (IGKV2D-30)
MQGTHWPPT

SEQ ID NO: 6712 - protein, 8 aa, Homo sapiens
  Heavy chain CDR3 for antibody 3356 (IGHV4-59)
ARDEGMDV

SEQ ID NO: 6713 - protein, 9 aa, Homo sapiens
  Light chain CDR3 for antibody 3357 (IGKV1D-17)
LQHNSYPYT

SEQ ID NO: 6714 - protein, 10 aa, Homo sapiens
  Heavy chain CDR3 for antibody 3357 (IGHV3-33)
ARDSPDGMDA

SEQ ID NO: 6715 - protein, 9 aa, Homo sapiens
  Light chain CDR3 for antibody 3358 (IGKV5-2)
LQHANFPWT

SEQ ID NO: 6716 - protein, 12 aa, Homo sapiens
  Heavy chain CDR3 for antibody 3358 (IGHV4-59)
ARAVVGHNGMDV

SEQ ID NO: 6717 - protein, 9 aa, Homo sapiens
  Light chain CDR3 for antibody 3359 (IGKV1-9)
QQLISYPYT

SEQ ID NO: 6718 - protein, 17 aa, Homo sapiens
  Heavy chain CDR3 for antibody 3359 (IGHV3-33)
AREITMVRGDNYYGLDV

SEQ ID NO: 6719 - protein, 9 aa, Homo sapiens
  Light chain CDR3 for antibody 3360 (IGKV3-15)
QQYNNWPRT

SEQ ID NO: 6720 - protein, 10 aa, Homo sapiens
  Heavy chain CDR3 for antibody 3360 (IGHV3-33)
ARESTDGMDV

SEQ ID NO: 6721 - protein, 9 aa, Homo sapiens
  Light chain CDR3 for antibody 3361 (IGKV1-9)
QQFNSYPFT

SEQ ID NO: 6722 - protein, 17 aa, Homo sapiens
  Heavy chain CDR3 for antibody 3361 (IGHV3-33)
AREITMVRGDNYYGLDV

SEQ ID NO: 6723 - protein, 9 aa, Homo sapiens
  Light chain CDR3 for antibody 3362 (IGKV1-27)
QKYNSAPYT

SEQ ID NO: 6724 - protein, 13 aa, Homo sapiens
  Heavy chain CDR3 for antibody 3362 (IGHV3-33)
ARVLRYFDPDFDY

SEQ ID NO: 6725 - protein, 9 aa, Homo sapiens
  Light chain CDR3 for antibody 3363 (IGKV1-9)
QRLNSYPYT

SEQ ID NO: 6726 - protein, 13 aa, Homo sapiens
  Heavy chain CDR3 for antibody 3363 (IGHV3-33)
ARDYCGGDCYPDP

SEQ ID NO: 6727 - protein, 9 aa, Homo sapiens
  Light chain CDR3 for antibody 3364 (IGKV1-6)
LQDYNYPWT

SEQ ID NO: 6728 - protein, 8 aa, Homo sapiens
  Heavy chain CDR3 for antibody 3364 (IGHV4-59)
ASGACFDY

SEQ ID NO: 6729 - protein, 9 aa, Homo sapiens
  Light chain CDR3 for antibody 3365 (IGKV1-8)
QQYYSYPFT

SEQ ID NO: 6730 - protein, 13 aa, Homo sapiens
  Heavy chain CDR3 for antibody 3365 (IGHV3-23)
AKGPITISLYFDY

SEQ ID NO: 6731 - protein, 9 aa, Homo sapiens
  Light chain CDR3 for antibody 3366 (IGKV1-9)
QQLNSYPYT

SEQ ID NO: 6732 - protein, 19 aa, Homo sapiens
  Heavy chain CDR3 for antibody 3366 (IGHV1-18)
ARDHGYCSSTSCYRAWFDP

SEQ ID NO: 6733 - protein, 8 aa, Homo sapiens
  Light chain CDR3 for antibody 3367 (IGKV1-17)
LQHNSYRT

SEQ ID NO: 6734 - protein, 10 aa, Homo sapiens
  Heavy chain CDR3 for antibody 3367 (IGHV1-18)
ARSPYYDIDY

SEQ ID NO: 6735 - protein, 9 aa, Homo sapiens
  Light chain CDR3 for antibody 3368 (IGKV1-6)
LQDYNYPYT

SEQ ID NO: 6736 - protein, 18 aa, Homo sapiens
  Heavy chain CDR3 for antibody 3368 (IGHV3-33)
ARYGDPERDYYYYYGMDV

SEQ ID NO: 6737 - protein, 9 aa, Homo sapiens
  Light chain CDR3 for antibody 3369 (IGKV1-6)
LQDYNYPWT

SEQ ID NO: 6738 - protein, 10 aa, Homo sapiens
  Heavy chain CDR3 for antibody 3369 (IGHV1-24)
ATDRNWVFDY

SEQ ID NO: 6739 - protein, 9 aa, Homo sapiens
  Light chain CDR3 for antibody 3370 (IGKV1-5)
QQYNSYYRT

SEQ ID NO: 6740 - protein, 19 aa, Homo sapiens
  Heavy chain CDR3 for antibody 3370 (IGHV1-18)
ARDHGYCSSTSCYRAWFDP

SEQ ID NO: 6741 - protein, 9 aa, Homo sapiens
  Light chain CDR3 for antibody 3371 (IGKV1-9)
QQLNSHPFT

SEQ ID NO: 6742 - protein, 17 aa, Homo sapiens
  Heavy chain CDR3 for antibody 3371 (IGHV3-33)
AREITMVRGDTSYGMDV

SEQ ID NO: 6743 - protein, 9 aa, Homo sapiens
  Light chain CDR3 for antibody 3372 (IGKV1-6)
LQDYNYPYT

SEQ ID NO: 6744 - protein, 15 aa, Homo sapiens
  Heavy chain CDR3 for antibody 3372 (IGHV3-33)
ARRGYSYGYPDYFDY

SEQ ID NO: 6745 - protein, 9 aa, Homo sapiens
  Light chain CDR3 for antibody 3373 (IGKV1D-17)
LQHNSYPYT

SEQ ID NO: 6746 - protein, 10 aa, Homo sapiens
  Heavy chain CDR3 for antibody 3373 (IGHV3-33)
ARAATDGMDA

SEQ ID NO: 6747 - protein, 9 aa, Homo sapiens
  Light chain CDR3 for antibody 3374 (IGKV1-27)
QKYNSAPLT

SEQ ID NO: 6748 - protein, 16 aa, Homo sapiens
  Heavy chain CDR3 for antibody 3374 (IGHV3-33)
ARDRDIVATGEYYFDY

SEQ ID NO: 6749 - protein, 9 aa, Homo sapiens
  Light chain CDR3 for antibody 3375 (IGKV1D-17)
LQHNSYPYT

SEQ ID NO: 6750 - protein, 10 aa, Homo sapiens
  Heavy chain CDR3 for antibody 3375 (IGHV3-33)
ARETVRGIDY

SEQ ID NO: 6751 - protein, 9 aa, Homo sapiens
  Light chain CDR3 for antibody 3376 (IGKV1-8)
QQYYSYPIT

SEQ ID NO: 6752 - protein, 10 aa, Homo sapiens
  Heavy chain CDR3 for antibody 3376 (IGHV3-33)
ARVDQLLFDY

SEQ ID NO: 6753 - protein, 9 aa, Homo sapiens
  Light chain CDR3 for antibody 3377 (IGKV1-12)
QQANSFPWT

SEQ ID NO: 6754 - protein, 13 aa, Homo sapiens
  Heavy chain CDR3 for antibody 3377 (IGHV1-24)
ATTYSGYAYYFDY

SEQ ID NO: 6755 - protein, 9 aa, Homo sapiens
  Light chain CDR3 for antibody 3378 (IGKV1-17)
LQHNSYPYT

SEQ ID NO: 6756 - protein, 27 aa, Homo sapiens
  Heavy chain CDR3 for antibody 3378 (IGHV3-20)
VRDRHIVVVTADIREDSYYYYYYGMDV

SEQ ID NO: 6757 - protein, 9 aa, Homo sapiens
  Light chain CDR3 for antibody 3379 (IGKV1-27)
QKYNSAPLT

SEQ ID NO: 6758 - protein, 10 aa, Homo sapiens
  Heavy chain CDR3 for antibody 3379 (IGHV3-33)
ARESTDGMDV

SEQ ID NO: 6759 - protein, 9 aa, Homo sapiens
  Light chain CDR3 for antibody 3380 (IGKV1-9)
QQLNSHPFT

SEQ ID NO: 6760 - protein, 17 aa, Homo sapiens
  Heavy chain CDR3 for antibody 3380 (IGHV3-33)
EREITMVRGDNYDGMDV

SEQ ID NO: 6761 - protein, 9 aa, Homo sapiens
  Light chain CDR3 for antibody 3381 (IGKV1-6)
LQDYNYPWT

SEQ ID NO: 6762 - protein, 10 aa, Homo sapiens
  Heavy chain CDR3 for antibody 3381 (IGHV3-33)
AREIWDDYDY

SEQ ID NO: 6763 - protein, 9 aa, Homo sapiens
  Light chain CDR3 for antibody 3382 (IGKV1-8)
QQYYSYPFT

SEQ ID NO: 6764 - protein, 17 aa, Homo sapiens
  Heavy chain CDR3 for antibody 3382 (IGHV3-33)
AREITMVRGDNYYGLDV

SEQ ID NO: 6765 - protein, 9 aa, Homo sapiens
  Light chain CDR3 for antibody 3383 (IGKV1-6)
LQDYNYPWT

SEQ ID NO: 6766 - protein, 16 aa, Homo sapiens
  Heavy chain CDR3 for antibody 3383 (IGHV1-46)
ARDRIAVAGGSYGMDV

SEQ ID NO: 6767 - protein, 9 aa, Homo sapiens
  Light chain CDR3 for antibody 3384 (IGKV1-9)
HQLISYPYT

SEQ ID NO: 6768 - protein, 10 aa, Homo sapiens
  Heavy chain CDR3 for antibody 3384 (IGHV3-33)
ARESTDGMDV

SEQ ID NO: 6769 - protein, 9 aa, Homo sapiens
  Light chain CDR3 for antibody 3385 (IGKV1-9)
QQLNSYPPT

SEQ ID NO: 6770 - protein, 16 aa, Homo sapiens
  Heavy chain CDR3 for antibody 3385 (IGHV1-18)
AMTTVTTDYYYYGMDV

SEQ ID NO: 6771 - protein, 9 aa, Homo sapiens
  Light chain CDR3 for antibody 3386 (IGKV1-9)
QQLDSYPFI

SEQ ID NO: 6772 - protein, 17 aa, Homo sapiens
  Heavy chain CDR3 for antibody 3386 (IGHV3-33)
AREITMVRGDNYYGLDV

SEQ ID NO: 6773 - protein, 9 aa, Homo sapiens
  Light chain CDR3 for antibody 3387 (IGKV1-9)
QHLNSHPFT

SEQ ID NO: 6774 - protein, 10 aa, Homo sapiens
  Heavy chain CDR3 for antibody 3387 (IGHV3-33)
ARESTDGMDA

SEQ ID NO: 6775 - protein, 9 aa, Homo sapiens
  Light chain CDR3 for antibody 3388 (IGKV1-9)
QQLNGYPYT

SEQ ID NO: 6776 - protein, 15 aa, Homo sapiens
  Heavy chain CDR3 for antibody 3388 (IGHV1-46)
AREKSYGSGSSPFDY

SEQ ID NO: 6777 - protein, 9 aa, Homo sapiens
  Light chain CDR3 for antibody 3389 (IGKV1D-17)
LQHNSYPYT

SEQ ID NO: 6778 - protein, 10 aa, Homo sapiens
  Heavy chain CDR3 for antibody 3389 (IGHV3-33)
ARESTYGIDA

SEQ ID NO: 6779 - protein, 9 aa, Homo sapiens
  Light chain CDR3 for antibody 3390 (IGKV1D-17)
LQHNSYPYT

SEQ ID NO: 6780 - protein, 10 aa, Homo sapiens
  Heavy chain CDR3 for antibody 3390 (IGHV3-33)
ARDATDGIDV

SEQ ID NO: 6781 - protein, 9 aa, Homo sapiens
  Light chain CDR3 for antibody 3391 (IGKV1D-17)
LQHNSYPYT

SEQ ID NO: 6782 - protein, 17 aa, Homo sapiens
  Heavy chain CDR3 for antibody 3391 (IGHV3-33)
AREITMLRGDNYYGLDV

SEQ ID NO: 6783 - protein, 9 aa, Homo sapiens
  Light chain CDR3 for antibody 3392 (IGKV1-9)
QQLNSYPFT

SEQ ID NO: 6784 - protein, 17 aa, Homo sapiens
  Heavy chain CDR3 for antibody 3392 (IGHV3-33)
ARESTRVRGDNYYGLDV

SEQ ID NO: 6785 - protein, 9 aa, Homo sapiens
  Light chain CDR3 for antibody 3393 (IGKV1D-17)
LQHNSYPYT

SEQ ID NO: 6786 - protein, 13 aa, Homo sapiens
  Heavy chain CDR3 for antibody 3393 (IGHV1-24)
ATTYSGYVYYFDY

SEQ ID NO: 6787 - protein, 9 aa, Homo sapiens
  Light chain CDR3 for antibody 3394 (IGKV1D-17)
LQHNSYPYT

SEQ ID NO: 6788 - protein, 10 aa, Homo sapiens
  Heavy chain CDR3 for antibody 3394 (IGHV3-48)
ARESTYAMDF

SEQ ID NO: 6789 - protein, 9 aa, Homo sapiens
  Light chain CDR3 for antibody 3395 (IGKV1-8)
QQYYSYPLT

SEQ ID NO: 6790 - protein, 14 aa, Homo sapiens
  Heavy chain CDR3 for antibody 3395 (IGHV3-23)
AKEGIAVALYYFDY

SEQ ID NO: 6791 - protein, 9 aa, Homo sapiens
  Light chain CDR3 for antibody 3396 (IGKV1D-17)
LQHNSYPYT

SEQ ID NO: 6792 - protein, 17 aa, Homo sapiens
  Heavy chain CDR3 for antibody 3396 (IGHV3-33)
AREVTMVRGDNYYGLDV

SEQ ID NO: 6793 - protein, 9 aa, Homo sapiens
  Light chain CDR3 for antibody 3397 (IGKV1-9)
QQLNSYPFT

SEQ ID NO: 6794 - protein, 17 aa, Homo sapiens
  Heavy chain CDR3 for antibody 3397 (IGHV3-33)
EREINMVRGDNYYGLDV

SEQ ID NO: 6795 - protein, 9 aa, Homo sapiens
  Light chain CDR3 for antibody 3398 (IGKV1-9)
QQLNSYPFT

SEQ ID NO: 6796 - protein, 17 aa, Homo sapiens
  Heavy chain CDR3 for antibody 3398 (IGHV3-30)
AREITMFRGDNYYAIDV

SEQ ID NO: 6797 - protein, 9 aa, Homo sapiens
  Light chain CDR3 for antibody 3399 (IGKV3-15)
QQYNNWPRT

SEQ ID NO: 6798 - protein, 8 aa, Homo sapiens
  Heavy chain CDR3 for antibody 3399 (IGHV1-18)
ASGACFDY

SEQ ID NO: 6799 - protein, 9 aa, Homo sapiens
  Light chain CDR3 for antibody 3400 (IGKV1D-17)
LQHNSYPYT

SEQ ID NO: 6800 - protein, 10 aa, Homo sapiens
  Heavy chain CDR3 for antibody 3400 (IGHV3-30)
AGASTYGMDV

SEQ ID NO: 6801 - protein, 9 aa, Homo sapiens
  Light chain CDR3 for antibody 3401 (IGKV1-16)
QQYNSYPLT

SEQ ID NO: 6802 - protein, 14 aa, Homo sapiens
  Heavy chain CDR3 for antibody 3401 (IGHV1-18)
ARWWGGDYYYGMDV

SEQ ID NO: 6803 - protein, 9 aa, Homo sapiens
  Light chain CDR3 for antibody 3402 (IGKV1D-17)
LQHNSYPYT

SEQ ID NO: 6804 - protein, 10 aa, Homo sapiens
  Heavy chain CDR3 for antibody 3402 (IGHV3-33)
AREATEGFDY

SEQ ID NO: 6805 - protein, 9 aa, Homo sapiens
  Light chain CDR3 for antibody 3403 (IGKV3D-20)
QQYGSSPWT

SEQ ID NO: 6806 - protein, 15 aa, Homo sapiens
  Heavy chain CDR3 for antibody 3403 (IGHV1-46)
AREKYYGSGSYPFDY

SEQ ID NO: 6807 - protein, 9 aa, Homo sapiens
  Light chain CDR3 for antibody 3404 (IGKV1-17)
LQHNSYPWT

SEQ ID NO: 6808 - protein, 19 aa, Homo sapiens
  Heavy chain CDR3 for antibody 3404 (IGHV3-33)
AREDSSSWYPDYYYYGMDV

SEQ ID NO: 6809 - protein, 9 aa, Homo sapiens
  Light chain CDR3 for antibody 3405 (IGKV1-9)
QHLNSHPFT

SEQ ID NO: 6810 - protein, 10 aa, Homo sapiens
  Heavy chain CDR3 for antibody 3405 (IGHV3-33)
ARETVAGFDY

SEQ ID NO: 6811 - protein, 9 aa, Homo sapiens
  Light chain CDR3 for antibody 3406 (IGKV1-9)
QQLNSHPFT

SEQ ID NO: 6812 - protein, 17 aa, Homo sapiens
  Heavy chain CDR3 for antibody 3406 (IGHV3-33)
AREITMVRGDNYYGIDA

SEQ ID NO: 6813 - protein, 9 aa, Homo sapiens
  Light chain CDR3 for antibody 3407 (IGKV1D-17)
LQHNSYPYT

SEQ ID NO: 6814 - protein, 10 aa, Homo sapiens
  Heavy chain CDR3 for antibody 3407 (IGHV3-23)
AIESTYAIDV

SEQ ID NO: 6815 - protein, 9 aa, Homo sapiens
  Light chain CDR3 for antibody 3408 (IGKV1-9)
QQLNSHPFT

SEQ ID NO: 6816 - protein, 10 aa, Homo sapiens
  Heavy chain CDR3 for antibody 3408 (IGHV3-33)
ARESGEGFDY

SEQ ID NO: 6817 - protein, 9 aa, Homo sapiens
  Light chain CDR3 for antibody 3409 (IGKV1-9)
QHLNSHPFT

SEQ ID NO: 6818 - protein, 17 aa, Homo sapiens
  Heavy chain CDR3 for antibody 3409 (IGHV3-33)
AREITRVRGDNYYGMDV

SEQ ID NO: 6819 - protein, 9 aa, Homo sapiens
  Light chain CDR3 for antibody 3410 (IGKV1-5)
QQYNSYSRT

SEQ ID NO: 6820 - protein, 17 aa, Homo sapiens
  Heavy chain CDR3 for antibody 3410 (IGHV4-59)
ARTLFWFGELGGWYFDL

SEQ ID NO: 6821 - protein, 9 aa, Homo sapiens
  Light chain CDR3 for antibody 3411 (IGKV1-9)
QHLNSHPFT

SEQ ID NO: 6822 - protein, 17 aa, Homo sapiens
  Heavy chain CDR3 for antibody 3411 (IGHV3-33)
ARESTMVRGDNYYGMDV

SEQ ID NO: 6823 - protein, 9 aa, Homo sapiens
  Light chain CDR3 for antibody 3412 (IGKV1-9)
QQLISYPYT

SEQ ID NO: 6824 - protein, 15 aa, Homo sapiens
  Heavy chain CDR3 for antibody 3412 (IGHV1-46)
AREKYYGSGSYPFDA

SEQ ID NO: 6825 - protein, 9 aa, Homo sapiens
  Light chain CDR3 for antibody 3413 (IGKV1-8)
QQYYSYPIT

SEQ ID NO: 6826 - protein, 14 aa, Homo sapiens
  Heavy chain CDR3 for antibody 3413 (IGHV3-23)
AKGVVVTAMNWFDP

SEQ ID NO: 6827 - protein, 9 aa, Homo sapiens
  Light chain CDR3 for antibody 3414 (IGKV1-9)
QQFNSYPFT

SEQ ID NO: 6828 - protein, 17 aa, Homo sapiens
  Heavy chain CDR3 for antibody 3414 (IGHV3-33)
AREITVVRGDNYYGMDV

SEQ ID NO: 6829 - protein, 9 aa, Homo sapiens
  Light chain CDR3 for antibody 3415 (IGKV1-8)
QQYYSYPYT

SEQ ID NO: 6830 - protein, 14 aa, Homo sapiens
  Heavy chain CDR3 for antibody 3415 (IGHV3-23)
AKERAVAALNWFDP

SEQ ID NO: 6831 - protein, 9 aa, Homo sapiens
  Light chain CDR3 for antibody 3416 (IGKV1-9)
QQLNGYPYT

SEQ ID NO: 6832 - protein, 15 aa, Homo sapiens
  Heavy chain CDR3 for antibody 3416 (IGHV1-46)
AREKYYGSGSYPFAS

SEQ ID NO: 6833 - protein, 9 aa, Homo sapiens
  Light chain CDR3 for antibody 3417 (IGKV1-9)
QQLNSHPFT

SEQ ID NO: 6834 - protein, 17 aa, Homo sapiens
  Heavy chain CDR3 for antibody 3417 (IGHV3-33)
AREITMVRGENYYGMDV

SEQ ID NO: 6835 - protein, 9 aa, Homo sapiens
  Light chain CDR3 for antibody 3418 (IGKV3-15)
QQYNNWPRT

SEQ ID NO: 6836 - protein, 19 aa, Homo sapiens
  Heavy chain CDR3 for antibody 3418 (IGHV1-18)
ARDHGYCSSTSCYRAWFDP

SEQ ID NO: 6837 - protein, 9 aa, Homo sapiens
  Light chain CDR3 for antibody 3419 (IGKV1D-17)
LQHNSYPYT

SEQ ID NO: 6838 - protein, 10 aa, Homo sapiens
  Heavy chain CDR3 for antibody 3419 (IGHV3-33)
ARQSTDAIDV

SEQ ID NO: 6839 - protein, 9 aa, Homo sapiens
  Light chain CDR3 for antibody 3420 (IGKV3D-20)
QQYGSSPWT

SEQ ID NO: 6840 - protein, 10 aa, Homo sapiens
  Heavy chain CDR3 for antibody 3420 (IGHV3-33)
ARESTDGMDV

SEQ ID NO: 6841 - protein, 9 aa, Homo sapiens
  Light chain CDR3 for antibody 3421 (IGKV1-9)
QQFNSHPFT

SEQ ID NO: 6842 - protein, 10 aa, Homo sapiens
  Heavy chain CDR3 for antibody 3421 (IGHV3-33)
ARESTDGMDV

SEQ ID NO: 6843 - protein, 9 aa, Homo sapiens
  Light chain CDR3 for antibody 3422 (IGKV3-11)
QQRSNWPWT

SEQ ID NO: 6844 - protein, 27 aa, Homo sapiens
  Heavy chain CDR3 for antibody 3422 (IGHV3-20)
ARDRHIVVVTADIREDSYYYYYYGMDV

SEQ ID NO: 6845 - protein, 9 aa, Homo sapiens
  Light chain CDR3 for antibody 3423 (IGKV1-9)
QQLNSHPFT

SEQ ID NO: 6846 - protein, 17 aa, Homo sapiens
  Heavy chain CDR3 for antibody 3423 (IGHV3-33)
ARESTMVRGDNYYGMDV

SEQ ID NO: 6847 - protein, 9 aa, Homo sapiens
  Light chain CDR3 for antibody 3424 (IGKV1-9)
QQLISYPYT

SEQ ID NO: 6848 - protein, 15 aa, Homo sapiens
  Heavy chain CDR3 for antibody 3424 (IGHV1-46)
AREKYYGAGSYPFES

SEQ ID NO: 6849 - protein, 9 aa, Homo sapiens
  Light chain CDR3 for antibody 3425 (IGKV3-15)
QQYNNWPRT

SEQ ID NO: 6850 - protein, 17 aa, Homo sapiens
  Heavy chain CDR3 for antibody 3425 (IGHV3-33)
ARDRATVTLYYYYGMDV

SEQ ID NO: 6851 - protein, 9 aa, Homo sapiens
  Light chain CDR3 for antibody 3426 (IGKV1-27)
QKYNSAPLT

SEQ ID NO: 6852 - protein, 19 aa, Homo sapiens
  Heavy chain CDR3 for antibody 3426 (IGHV3-33)
AREDSSSWYPDYYYYGMDV

SEQ ID NO: 6853 - protein, 9 aa, Homo sapiens
  Light chain CDR3 for antibody 3427 (IGKV3D-20)
QQYGSSPWT

SEQ ID NO: 6854 - protein, 17 aa, Homo sapiens
  Heavy chain CDR3 for antibody 3427 (IGHV3-33)
AREITMVRGDNYYGMDV

SEQ ID NO: 6855 - protein, 9 aa, Homo sapiens
  Light chain CDR3 for antibody 3428 (IGKV1-9)
QQLISYPYT

SEQ ID NO: 6856 - protein, 15 aa, Homo sapiens
  Heavy chain CDR3 for antibody 3428 (IGHV1-46)
AREKYYGSATYPFDS

SEQ ID NO: 6857 - protein, 9 aa, Homo sapiens
  Light chain CDR3 for antibody 3429 (IGKV1D-17)
LQHNSYPYT

SEQ ID NO: 6858 - protein, 10 aa, Homo sapiens
  Heavy chain CDR3 for antibody 3429 (IGHV3-33)
ASASTDAMDV

SEQ ID NO: 6859 - protein, 9 aa, Homo sapiens
  Light chain CDR3 for antibody 3430 (IGKV1-9)
HQLNSYPYT

SEQ ID NO: 6860 - protein, 15 aa, Homo sapiens
  Heavy chain CDR3 for antibody 3430 (IGHV1-46)
AREKYHGSGSYPFDS

SEQ ID NO: 6861 - protein, 9 aa, Homo sapiens
  Light chain CDR3 for antibody 3431 (IGKV1D-17)
LQHDSYPYT

SEQ ID NO: 6862 - protein, 10 aa, Homo sapiens
  Heavy chain CDR3 for antibody 3431 (IGHV3-23)
AIESTDGMDF

SEQ ID NO: 6863 - protein, 9 aa, Homo sapiens
  Light chain CDR3 for antibody 3432 (IGKV1D-17)
LQHDSYPYT

SEQ ID NO: 6864 - protein, 10 aa, Homo sapiens
  Heavy chain CDR3 for antibody 3432 (IGHV3-33)
AREATDGMEV

SEQ ID NO: 6865 - protein, 9 aa, Homo sapiens
  Light chain CDR3 for antibody 3433 (IGKV1-9)
QQLNSHPFT

SEQ ID NO: 6866 - protein, 17 aa, Homo sapiens
  Heavy chain CDR3 for antibody 3433 (IGHV3-33)
AREITRGRGDNYYGMDV

SEQ ID NO: 6867 - protein, 9 aa, Homo sapiens
  Light chain CDR3 for antibody 3434 (IGKV1-17)
LQHNSYPYT

SEQ ID NO: 6868 - protein, 10 aa, Homo sapiens
  Heavy chain CDR3 for antibody 3434 (IGHV3-64)
ASESGDGFDY

SEQ ID NO: 6869 - protein, 9 aa, Homo sapiens
  Light chain CDR3 for antibody 3435 (IGKV1D-17)
LQHNSYPYT

SEQ ID NO: 6870 - protein, 14 aa, Homo sapiens
  Heavy chain CDR3 for antibody 3435 (IGHV3-23)
AKERAVAGLNWFDP

SEQ ID NO: 6871 - protein, 9 aa, Homo sapiens
  Light chain CDR3 for antibody 3436 (IGKV3D-20)
QQYGSSPWT

SEQ ID NO: 6872 - protein, 18 aa, Homo sapiens
  Heavy chain CDR3 for antibody 3436 (IGHV3-11)
ARYGDPERDYYYYYGMDV

SEQ ID NO: 6873 - protein, 9 aa, Homo sapiens
  Light chain CDR3 for antibody 3437 (IGKV1D-17)
LQHNSYPYT

SEQ ID NO: 6874 - protein, 10 aa, Homo sapiens
  Heavy chain CDR3 for antibody 3437 (IGHV3-30)
AGEAADGMDV

SEQ ID NO: 6875 - protein, 9 aa, Homo sapiens
  Light chain CDR3 for antibody 3438 (IGKV1D-16)
QQYNSYPYT

SEQ ID NO: 6876 - protein, 14 aa, Homo sapiens
  Heavy chain CDR3 for antibody 3438 (IGHV3-33)
ARENIAVVQGGMDV

SEQ ID NO: 6877 - protein, 9 aa, Homo sapiens
  Light chain CDR3 for antibody 3439 (IGKV1-6)
LQDYNYPYT

SEQ ID NO: 6878 - protein, 17 aa, Homo sapiens
  Heavy chain CDR3 for antibody 3439 (IGHV3-23)
AKGRGARGFYYYYGMDV

SEQ ID NO: 6879 - protein, 9 aa, Homo sapiens
  Light chain CDR3 for antibody 3440 (IGKV1-9)
QQLNSYPWT

SEQ ID NO: 6880 - protein, 14 aa, Homo sapiens
  Heavy chain CDR3 for antibody 3440 (IGHV3-23)
AKRDYGSGSSYFQH

SEQ ID NO: 6881 - protein, 9 aa, Homo sapiens
  Light chain CDR3 for antibody 3441 (IGKV1-9)
QQLNSYPYT

SEQ ID NO: 6882 - protein, 13 aa, Homo sapiens
  Heavy chain CDR3 for antibody 3441 (IGHV6-1)
ARGKFDYYYGMDV

SEQ ID NO: 6883 - protein, 9 aa, Homo sapiens
  Light chain CDR3 for antibody 3442 (IGKV1-6)
LQDYNYLYT

SEQ ID NO: 6884 - protein, 17 aa, Homo sapiens
  Heavy chain CDR3 for antibody 3442 (IGHV4-39)
ARKYYDILTGTPLAFDI

SEQ ID NO: 6885 - protein, 9 aa, Homo sapiens
  Light chain CDR3 for antibody 3443 (IGKV1-12)
QQANSFPWT

SEQ ID NO: 6886 - protein, 15 aa, Homo sapiens
  Heavy chain CDR3 for antibody 3443 (IGHV1-46)
AREKYYGSGSYPFDY

SEQ ID NO: 6887 - protein, 9 aa, Homo sapiens
  Light chain CDR3 for antibody 3444 (IGKV1D-17)
LQHNSYPYT

SEQ ID NO: 6888 - protein, 10 aa, Homo sapiens
  Heavy chain CDR3 for antibody 3444 (IGHV3-33)
ARDSTAGMAV

SEQ ID NO: 6889 - protein, 9 aa, Homo sapiens
  Light chain CDR3 for antibody 3445 (IGKV3-15)
QQYNNWPRT

SEQ ID NO: 6890 - protein, 17 aa, Homo sapiens
  Heavy chain CDR3 for antibody 3445 (IGHV3-33)
AREITMVRGDNYYGMDV

SEQ ID NO: 6891 - protein, 9 aa, Homo sapiens
  Light chain CDR3 for antibody 3446 (IGKV1-39)
QQSYSTPYT

SEQ ID NO: 6892 - protein, 13 aa, Homo sapiens
  Heavy chain CDR3 for antibody 3446 (IGHV1-24)
ATDYGDYRYYFDY

SEQ ID NO: 6893 - protein, 9 aa, Homo sapiens
  Light chain CDR3 for antibody 3447 (IGKV1-9)
QQLNSYPFT

SEQ ID NO: 6894 - protein, 17 aa, Homo sapiens
  Heavy chain CDR3 for antibody 3447 (IGHV3-33)
AREIAMVQGDSYYGMDV

SEQ ID NO: 6895 - protein, 9 aa, Homo sapiens
  Light chain CDR3 for antibody 3448 (IGKV1-9)
QQLNSHPFT

SEQ ID NO: 6896 - protein, 17 aa, Homo sapiens
  Heavy chain CDR3 for antibody 3448 (IGHV3-33)
ARAITMFRGDNYYGMDV

SEQ ID NO: 6897 - protein, 9 aa, Homo sapiens
  Light chain CDR3 for antibody 3449 (IGKV1-9)
QQLNSYPFT

SEQ ID NO: 6898 - protein, 17 aa, Homo sapiens
  Heavy chain CDR3 for antibody 3449 (IGHV3-33)
AREITMVRGDNYYGLEG

SEQ ID NO: 6899 - protein, 9 aa, Homo sapiens
  Light chain CDR3 for antibody 3450 (IGKV1-9)
QQLNGYPYT

SEQ ID NO: 6900 - protein, 15 aa, Homo sapiens
  Heavy chain CDR3 for antibody 3450 (IGHV1-46)
AREKYYGSGTYPFDY

SEQ ID NO: 6901 - protein, 9 aa, Homo sapiens
  Light chain CDR3 for antibody 3451 (IGKV1D-17)
LQHNSYPYT

SEQ ID NO: 6902 - protein, 10 aa, Homo sapiens
  Heavy chain CDR3 for antibody 3451 (IGHV3-33)
ASESADGMDA

SEQ ID NO: 6903 - protein, 9 aa, Homo sapiens
  Light chain CDR3 for antibody 3452 (IGKV1-8)
QQYYSYPLT

SEQ ID NO: 6904 - protein, 10 aa, Homo sapiens
  Heavy chain CDR3 for antibody 3452 (IGHV3-33)
ARESTDGMDV

SEQ ID NO: 6905 - protein, 9 aa, Homo sapiens
  Light chain CDR3 for antibody 3453 (IGKV1D-17)
LQHNSYPYT

SEQ ID NO: 6906 - protein, 16 aa, Homo sapiens
  Heavy chain CDR3 for antibody 3453 (IGHV3-33)
ARDRDIVATGEYYFDY

SEQ ID NO: 6907 - protein, 9 aa, Homo sapiens
  Light chain CDR3 for antibody 3454 (IGKV1-6)
LQDYNYPWT

SEQ ID NO: 6908 - protein, 13 aa, Homo sapiens
  Heavy chain CDR3 for antibody 3454 (IGHV3-20)
AREGGWGPWSFDL

SEQ ID NO: 6909 - protein, 9 aa, Homo sapiens
  Light chain CDR3 for antibody 3455 (IGKV1-17)
LQHNSYPYT

SEQ ID NO: 6910 - protein, 10 aa, Homo sapiens
  Heavy chain CDR3 for antibody 3455 (IGHV3-20)
AREGISSFDY

SEQ ID NO: 6911 - protein, 9 aa, Homo sapiens
  Light chain CDR3 for antibody 3456 (IGKV1-9)
QQLNSYPYT

SEQ ID NO: 6912 - protein, 15 aa, Homo sapiens
  Heavy chain CDR3 for antibody 3456 (IGHV1-46)
SREKYYGSGTYPFDS

SEQ ID NO: 6913 - protein, 10 aa, Homo sapiens
  Light chain CDR3 for antibody 3457 (IGKV1-9)
QQLNSYPPYT

SEQ ID NO: 6914 - protein, 10 aa, Homo sapiens
  Heavy chain CDR3 for antibody 3457 (IGHV3-53)
ARDYYGVLDY

SEQ ID NO: 6915 - protein, 9 aa, Homo sapiens
  Light chain CDR3 for antibody 3458 (IGKV1-9)
LQHNSYPYT

SEQ ID NO: 6916 - protein, 10 aa, Homo sapiens
  Heavy chain CDR3 for antibody 3458 (IGHV3-33)
AIESTDAMNV

SEQ ID NO: 6917 - protein, 9 aa, Homo sapiens
  Light chain CDR3 for antibody 3459 (IGKV1-6)
LQDYNYPWT

SEQ ID NO: 6918 - protein, 10 aa, Homo sapiens
  Heavy chain CDR3 for antibody 3459 (IGHV3-33)
ARESTDGMDV

SEQ ID NO: 6919 - protein, 9 aa, Homo sapiens
  Light chain CDR3 for antibody 3460 (IGKV1-9)
QQLNSHPFT

SEQ ID NO: 6920 - protein, 17 aa, Homo sapiens
  Heavy chain CDR3 for antibody 3460 (IGHV3-30)
AREITVVRGDNYYGMDV

SEQ ID NO: 6921 - protein, 9 aa, Homo sapiens
  Light chain CDR3 for antibody 3461 (IGKV1-9)
QQLNSYPPT

SEQ ID NO: 6922 - protein, 18 aa, Homo sapiens
  Heavy chain CDR3 for antibody 3461 (IGHV3-11)
ARDVMVRGVMDYYYGMDV

SEQ ID NO: 6923 - protein, 9 aa, Homo sapiens
  Light chain CDR3 for antibody 3462 (IGKV1D-17)
LQHNSYPYT

SEQ ID NO: 6924 - protein, 10 aa, Homo sapiens
  Heavy chain CDR3 for antibody 3462 (IGHV3-33)
ARESSDGMDA

SEQ ID NO: 6925 - protein, 8 aa, Homo sapiens
  Light chain CDR3 for antibody 3463 (IGKV1-5)
QQYNSYWT

SEQ ID NO: 6926 - protein, 13 aa, Homo sapiens
  Heavy chain CDR3 for antibody 3463 (IGHV1-24)
ATTYSGYAYYFDY

SEQ ID NO: 6927 - protein, 9 aa, Homo sapiens
  Light chain CDR3 for antibody 3464 (IGKV6-21)
HQSSSLPYT

SEQ ID NO: 6928 - protein, 13 aa, Homo sapiens
  Heavy chain CDR3 for antibody 3464 (IGHV1-18)
AREGGSYYVSFDY

SEQ ID NO: 6929 - protein, 9 aa, Homo sapiens
  Light chain CDR3 for antibody 3465 (IGKV1-9)
QQLNSYPYT

SEQ ID NO: 6930 - protein, 15 aa, Homo sapiens
  Heavy chain CDR3 for antibody 3465 (IGHV1-46)
AREKYYGAGSYPIDY

SEQ ID NO: 6931 - protein, 9 aa, Homo sapiens
  Light chain CDR3 for antibody 3466 (IGKV1-9)
QQFNSHPFT

SEQ ID NO: 6932 - protein, 17 aa, Homo sapiens
  Heavy chain CDR3 for antibody 3466 (IGHV3-33)
AREIAMVRGDNYYGFDV

SEQ ID NO: 6933 - protein, 9 aa, Homo sapiens
  Light chain CDR3 for antibody 3467 (IGKV1-9)
HQLNSYPYT

SEQ ID NO: 6934 - protein, 15 aa, Homo sapiens
  Heavy chain CDR3 for antibody 3467 (IGHV1-46)
AREKYYGSGSYPFAY

SEQ ID NO: 6935 - protein, 9 aa, Homo sapiens
  Light chain CDR3 for antibody 3468 (IGKV1-17)
QQYNSYPRT

SEQ ID NO: 6936 - protein, 16 aa, Homo sapiens
  Heavy chain CDR3 for antibody 3468 (IGHV3-23)
AKEYYYGSGSYSLFDY

SEQ ID NO: 6937 - protein, 9 aa, Homo sapiens
  Light chain CDR3 for antibody 3469 (IGKV1-9)
QQLNSHPFT

SEQ ID NO: 6938 - protein, 17 aa, Homo sapiens
  Heavy chain CDR3 for antibody 3469 (IGHV3-33)
AREITMVRGDNYYGMDG

SEQ ID NO: 6939 - protein, 9 aa, Homo sapiens
  Light chain CDR3 for antibody 3470 (IGKV1D-17)
LQHNSYPYT

SEQ ID NO: 6940 - protein, 10 aa, Homo sapiens
  Heavy chain CDR3 for antibody 3470 (IGHV3-66)
AGETTDGMDA

SEQ ID NO: 6941 - protein, 9 aa, Homo sapiens
  Light chain CDR3 for antibody 3471 (IGKV1-9)
QQLNSYPYT

SEQ ID NO: 6942 - protein, 8 aa, Homo sapiens
  Heavy chain CDR3 for antibody 3471 (IGHV4-59)
ASGACFDY

SEQ ID NO: 6943 - protein, 9 aa, Homo sapiens
  Light chain CDR3 for antibody 3472 (IGKV1-9)
QHLNSYPFT

SEQ ID NO: 6944 - protein, 17 aa, Homo sapiens
  Heavy chain CDR3 for antibody 3472 (IGHV3-33)
AREITMVRGYNYYGIDV

SEQ ID NO: 6945 - protein, 9 aa, Homo sapiens
  Light chain CDR3 for antibody 3473 (IGKV1D-17)
LQHDSYPYT

SEQ ID NO: 6946 - protein, 10 aa, Homo sapiens
  Heavy chain CDR3 for antibody 3473 (IGHV3-33)
ARASPDGMDV

SEQ ID NO: 6947 - protein, 9 aa, Homo sapiens
  Light chain CDR3 for antibody 3474 (IGKV1-9)
QQLNSYPFT

SEQ ID NO: 6948 - protein, 17 aa, Homo sapiens
  Heavy chain CDR3 for antibody 3474 (IGHV3-33)
VREITMVRGDNYYGLDA

SEQ ID NO: 6949 - protein, 9 aa, Homo sapiens
  Light chain CDR3 for antibody 3475 (IGKV1-9)
QQLNSYPYT

SEQ ID NO: 6950 - protein, 15 aa, Homo sapiens
  Heavy chain CDR3 for antibody 3475 (IGHV1-46)
AREKYYGSGSSPFDS

SEQ ID NO: 6951 - protein, 9 aa, Homo sapiens
  Light chain CDR3 for antibody 3476 (IGKV1-9)
QQFNSHPFT

SEQ ID NO: 6952 - protein, 15 aa, Homo sapiens
  Heavy chain CDR3 for antibody 3476 (IGHV1-46)
VREKYYGSGSYPFDY

SEQ ID NO: 6953 - protein, 9 aa, Homo sapiens
  Light chain CDR3 for antibody 3477 (IGKV1-9)
QQLNSYPYT

SEQ ID NO: 6954 - protein, 15 aa, Homo sapiens
  Heavy chain CDR3 for antibody 3477 (IGHV1-46)
EREKYYGSGSYPFED

SEQ ID NO: 6955 - protein, 9 aa, Homo sapiens
  Light chain CDR3 for antibody 3478 (IGKV1D-17)
QQLNSYPYT

SEQ ID NO: 6956 - protein, 12 aa, Homo sapiens
  Heavy chain CDR3 for antibody 3478 (IGHV3-13)
ARGVFYYYGMDV

SEQ ID NO: 6957 - protein, 9 aa, Homo sapiens
  Light chain CDR3 for antibody 3479 (IGKV1-9)
QHLNSHPFT

SEQ ID NO: 6958 - protein, 17 aa, Homo sapiens
  Heavy chain CDR3 for antibody 3479 (IGHV3-33)
AREITMVRGDTYSGMDV

SEQ ID NO: 6959 - protein, 9 aa, Homo sapiens
  Light chain CDR3 for antibody 3480 (IGKV1-9)
QQLNSYPYT

SEQ ID NO: 6960 - protein, 13 aa, Homo sapiens
  Heavy chain CDR3 for antibody 3480 (IGHV1-24)
ATTYSGYAYYFDY

SEQ ID NO: 6961 - protein, 9 aa, Homo sapiens
  Light chain CDR3 for antibody 3481 (IGKV1-9)
QHLNSHPFT

SEQ ID NO: 6962 - protein, 17 aa, Homo sapiens
  Heavy chain CDR3 for antibody 3481 (IGHV3-33)
AREITMVRGDNYDGMEV

SEQ ID NO: 6963 - protein, 9 aa, Homo sapiens
  Light chain CDR3 for antibody 3482 (IGKV1-9)
QQLNSYPFT

SEQ ID NO: 6964 - protein, 17 aa, Homo sapiens
  Heavy chain CDR3 for antibody 3482 (IGHV3-33)
ARENTMVRGDNYSGLDV

SEQ ID NO: 6965 - protein, 9 aa, Homo sapiens
  Light chain CDR3 for antibody 3483 (IGKV1-9)
QQLNSYPFT

SEQ ID NO: 6966 - protein, 17 aa, Homo sapiens
  Heavy chain CDR3 for antibody 3483 (IGHV3-33)
ARESTMVRGDNYYGMDD

SEQ ID NO: 6967 - protein, 9 aa, Homo sapiens
  Light chain CDR3 for antibody 3484 (IGKV1-9)
QQLNGYPYT

SEQ ID NO: 6968 - protein, 15 aa, Homo sapiens
  Heavy chain CDR3 for antibody 3484 (IGHV1-46)
AREKDYGSGSYPFDD

SEQ ID NO: 6969 - protein, 9 aa, Homo sapiens
  Light chain CDR3 for antibody 3485 (IGKV1-6)
LQDYNYPYT

SEQ ID NO: 6970 - protein, 17 aa, Homo sapiens
  Heavy chain CDR3 for antibody 3485 (IGHV3-33)
ARDRATVTLYYYYGMDV

SEQ ID NO: 6971 - protein, 9 aa, Homo sapiens
  Light chain CDR3 for antibody 3486 (IGKV6-21)
HQSSSLPWT

SEQ ID NO: 6972 - protein, 9 aa, Homo sapiens
  Heavy chain CDR3 for antibody 3486 (IGHV3-49)
TRVGVGFDY

SEQ ID NO: 6973 - protein, 9 aa, Homo sapiens
  Light chain CDR3 for antibody 3487 (IGKV1-9)
QHLNSHPFT

SEQ ID NO: 6974 - protein, 9 aa, Homo sapiens
  Heavy chain CDR3 for antibody 3487 (IGHV3-66)
AREGAGIDY

SEQ ID NO: 6975 - protein, 9 aa, Homo sapiens
  Light chain CDR3 for antibody 3488 (IGKV1-9)
QQLNSHPFT

SEQ ID NO: 6976 - protein, 17 aa, Homo sapiens
  Heavy chain CDR3 for antibody 3488 (IGHV3-33)
AREITMVRGDNCYGMEV

SEQ ID NO: 6977 - protein, 9 aa, Homo sapiens
  Light chain CDR3 for antibody 3489 (IGKV1-9)
QQLNSYPFT

SEQ ID NO: 6978 - protein, 17 aa, Homo sapiens
  Heavy chain CDR3 for antibody 3489 (IGHV3-33)
AREITKVRGYNYYGLDV

SEQ ID NO: 6979 - protein, 9 aa, Homo sapiens
  Light chain CDR3 for antibody 3490 (IGKV1D-17)
QQLNSYPFT

SEQ ID NO: 6980 - protein, 17 aa, Homo sapiens
  Heavy chain CDR3 for antibody 3490 (IGHV3-33)
AREITMVRGDNYYGLDF

SEQ ID NO: 6981 - protein, 9 aa, Homo sapiens
  Light chain CDR3 for antibody 3491 (IGKV1-9)
QQLNSYPFT

SEQ ID NO: 6982 - protein, 17 aa, Homo sapiens
  Heavy chain CDR3 for antibody 3491 (IGHV3-30)
AREITLVRVDNYYAMDV

SEQ ID NO: 6983 - protein, 9 aa, Homo sapiens
  Light chain CDR3 for antibody 3492 (IGKV3-15)
QQYNNWPRT

SEQ ID NO: 6984 - protein, 13 aa, Homo sapiens
  Heavy chain CDR3 for antibody 3492 (IGHV3-33)
ARDDSSGWYYFDY

SEQ ID NO: 6985 - protein, 9 aa, Homo sapiens
  Light chain CDR3 for antibody 3493 (IGKV1-9)
QQLISYPYT

SEQ ID NO: 6986 - protein, 15 aa, Homo sapiens
  Heavy chain CDR3 for antibody 3493 (IGHV1-46)
AREKYYGSESYPLDS

SEQ ID NO: 6987 - protein, 9 aa, Homo sapiens
  Light chain CDR3 for antibody 3494 (IGKV1-12)
QQANSFPWT

SEQ ID NO: 6988 - protein, 17 aa, Homo sapiens
  Heavy chain CDR3 for antibody 3494 (IGHV3-33)
AREITMVRGDNYYGMDV

SEQ ID NO: 6989 - protein, 9 aa, Homo sapiens
  Light chain CDR3 for antibody 3495 (IGKV1-9)
QQLNSHPFT

SEQ ID NO: 6990 - protein, 17 aa, Homo sapiens
  Heavy chain CDR3 for antibody 3495 (IGHV3-33)
AREITMVRVDNYYGMDF

SEQ ID NO: 6991 - protein, 9 aa, Homo sapiens
  Light chain CDR3 for antibody 3496 (IGKV1-9)
QQLISYPYT

SEQ ID NO: 6992 - protein, 15 aa, Homo sapiens
  Heavy chain CDR3 for antibody 3496 (IGHV1-46)
AREKYYGSGSSPFDS

SEQ ID NO: 6993 - protein, 9 aa, Homo sapiens
  Light chain CDR3 for antibody 3497 (IGKV1D-16)
QQYNSYPPT

SEQ ID NO: 6994 - protein, 16 aa, Homo sapiens
  Heavy chain CDR3 for antibody 3497 (IGHV3-33)
ARDQGAVGPYYYGMDV

SEQ ID NO: 6995 - protein, 9 aa, Homo sapiens
  Light chain CDR3 for antibody 3498 (IGKV1D-17)
LQHNSYPYT

SEQ ID NO: 6996 - protein, 10 aa, Homo sapiens
  Heavy chain CDR3 for antibody 3498 (IGHV3-33)
ARESTDGMEA

SEQ ID NO: 6997 - protein, 9 aa, Homo sapiens
  Light chain CDR3 for antibody 3499 (IGKV1-9)
LQHNSYPYT

SEQ ID NO: 6998 - protein, 10 aa, Homo sapiens
  Heavy chain CDR3 for antibody 3499 (IGHV3-33)
AREATDGIDD

SEQ ID NO: 6999 - protein, 9 aa, Homo sapiens
  Light chain CDR3 for antibody 3500 (IGKV1D-17)
LQHNSYPYT

SEQ ID NO: 7000 - protein, 10 aa, Homo sapiens
  Heavy chain CDR3 for antibody 3500 (IGHV3-33)
ARESSYGMDV

SEQ ID NO: 7001 - protein, 9 aa, Homo sapiens
  Light chain CDR3 for antibody 3501 (IGKV1-6)
LQDYNYPWT

SEQ ID NO: 7002 - protein, 17 aa, Homo sapiens
  Heavy chain CDR3 for antibody 3501 (IGHV3-33)
AREITMVRGDNYYGMDV

SEQ ID NO: 7003 - protein, 9 aa, Homo sapiens
  Light chain CDR3 for antibody 3502 (IGKV1D-17)
LQHNSYPYT

SEQ ID NO: 7004 - protein, 10 aa, Homo sapiens
  Heavy chain CDR3 for antibody 3502 (IGHV3-64)
ARDSGEGFEY

SEQ ID NO: 7005 - protein, 9 aa, Homo sapiens
  Light chain CDR3 for antibody 3503 (IGKV1D-17)
LQHNSYPYT

SEQ ID NO: 7006 - protein, 10 aa, Homo sapiens
  Heavy chain CDR3 for antibody 3503 (IGHV3-33)
ARESTNGMAA

SEQ ID NO: 7007 - protein, 9 aa, Homo sapiens
  Light chain CDR3 for antibody 3504 (IGKV6-21)
HQSSSLPYT

SEQ ID NO: 7008 - protein, 16 aa, Homo sapiens
  Heavy chain CDR3 for antibody 3504 (IGHV1-18)
AREYYGSGSYYIYFDY

SEQ ID NO: 7009 - protein, 9 aa, Homo sapiens
  Light chain CDR3 for antibody 3505 (IGKV1-9)
QQFNSHPFT

SEQ ID NO: 7010 - protein, 17 aa, Homo sapiens
  Heavy chain CDR3 for antibody 3505 (IGHV3-33)
EREITMVRGENYYGLDV

SEQ ID NO: 7011 - protein, 9 aa, Homo sapiens
  Light chain CDR3 for antibody 3506 (IGKV1D-17)
LQHNSYPYT

SEQ ID NO: 7012 - protein, 11 aa, Homo sapiens
  Heavy chain CDR3 for antibody 3506 (IGHV4-4)
ARATMVRNFDY

SEQ ID NO: 7013 - protein, 9 aa, Homo sapiens
  Light chain CDR3 for antibody 3507 (IGKV1-9)
HQLISYPYT

SEQ ID NO: 7014 - protein, 15 aa, Homo sapiens
  Heavy chain CDR3 for antibody 3507 (IGHV1-46)
AREKYYGAGSYPLDY

SEQ ID NO: 7015 - protein, 9 aa, Homo sapiens
  Light chain CDR3 for antibody 3508 (IGKV1-9)
QQLNSYPFT

SEQ ID NO: 7016 - protein, 17 aa, Homo sapiens
  Heavy chain CDR3 for antibody 3508 (IGHV3-30)
AREIAMLRGDNYYGLDV

SEQ ID NO: 7017 - protein, 9 aa, Homo sapiens
  Light chain CDR3 for antibody 3509 (IGKV1-9)
QQFNSYPFT

SEQ ID NO: 7018 - protein, 17 aa, Homo sapiens
  Heavy chain CDR3 for antibody 3509 (IGHV3-33)
GREITMVRGYNYYGMAV

SEQ ID NO: 7019 - protein, 9 aa, Homo sapiens
  Light chain CDR3 for antibody 3510 (IGKV1-6)
LQDYNYPWT

SEQ ID NO: 7020 - protein, 17 aa, Homo sapiens
  Heavy chain CDR3 for antibody 3510 (IGHV3-33)
AREGPYSSSWYGDWFDP

SEQ ID NO: 7021 - protein, 9 aa, Homo sapiens
  Light chain CDR3 for antibody 3511 (IGKV1-9)
QQLNSYPFT

SEQ ID NO: 7022 - protein, 17 aa, Homo sapiens
  Heavy chain CDR3 for antibody 3511 (IGHV3-11)
ARKITMFRGDNYYGLDV

SEQ ID NO: 7023 - protein, 9 aa, Homo sapiens
  Light chain CDR3 for antibody 3512 (IGKV1-9)
QQLNSYPFT

SEQ ID NO: 7024 - protein, 16 aa, Homo sapiens
  Heavy chain CDR3 for antibody 3512 (IGHV3-11)
ARDRDIVATGEYYFDY

SEQ ID NO: 7025 - protein, 9 aa, Homo sapiens
  Light chain CDR3 for antibody 3513 (IGKV1-9)
QHLNSHPFT

SEQ ID NO: 7026 - protein, 17 aa, Homo sapiens
  Heavy chain CDR3 for antibody 3513 (IGHV3-33)
AREITMVRGENYYGMDV

SEQ ID NO: 7027 - protein, 9 aa, Homo sapiens
  Light chain CDR3 for antibody 3514 (IGKV1-12)
QQANSFPWT

SEQ ID NO: 7028 - protein, 10 aa, Homo sapiens
  Heavy chain CDR3 for antibody 3514 (IGHV1-18)
ARESTDGMDV

SEQ ID NO: 7029 - protein, 9 aa, Homo sapiens
  Light chain CDR3 for antibody 3515 (IGKV1-39)
QQSYSTPYT

SEQ ID NO: 7030 - protein, 14 aa, Homo sapiens
  Heavy chain CDR3 for antibody 3515 (IGHV3-23)
AKDQIVATIEYFQH

SEQ ID NO: 7031 - protein, 9 aa, Homo sapiens
  Light chain CDR3 for antibody 3516 (IGKV1D-17)
LQHNSYPYT

SEQ ID NO: 7032 - protein, 10 aa, Homo sapiens
  Heavy chain CDR3 for antibody 3516 (IGHV3-30)
TRESTDAMHA

SEQ ID NO: 7033 - protein, 9 aa, Homo sapiens
  Light chain CDR3 for antibody 3517 (IGKV1-9)
QQLISYPYT

SEQ ID NO: 7034 - protein, 15 aa, Homo sapiens
  Heavy chain CDR3 for antibody 3517 (IGHV1-46)
AREKYYGSGSDPFDS

SEQ ID NO: 7035 - protein, 9 aa, Homo sapiens
  Light chain CDR3 for antibody 3518 (IGKV1D-16)
QQYNSYPYT

SEQ ID NO: 7036 - protein, 17 aa, Homo sapiens
  Heavy chain CDR3 for antibody 3518 (IGHV3-33)
AREITMVRGDNYYGMDV

SEQ ID NO: 7037 - protein, 9 aa, Homo sapiens
  Light chain CDR3 for antibody 3519 (IGKV1-9)
QQLNSHPFT

SEQ ID NO: 7038 - protein, 16 aa, Homo sapiens
  Heavy chain CDR3 for antibody 3519 (IGHV1-18)
AREGDTMVRGVIAFDY

SEQ ID NO: 7039 - protein, 9 aa, Homo sapiens
  Light chain CDR3 for antibody 3520 (IGKV3D-20)
QQYGSSPWT

SEQ ID NO: 7040 - protein, 16 aa, Homo sapiens
  Heavy chain CDR3 for antibody 3520 (IGHV3-33)
ARGDYDILTGLDYIDY

SEQ ID NO: 7041 - protein, 9 aa, Homo sapiens
  Light chain CDR3 for antibody 3521 (IGKV1-9)
QQLNSYPFT

SEQ ID NO: 7042 - protein, 17 aa, Homo sapiens
  Heavy chain CDR3 for antibody 3521 (IGHV3-71)
AREITMAGGDNYYGLDV

SEQ ID NO: 7043 - protein, 9 aa, Homo sapiens
  Light chain CDR3 for antibody 3522 (IGKV1D-17)
LQHNSYPYT

SEQ ID NO: 7044 - protein, 10 aa, Homo sapiens
  Heavy chain CDR3 for antibody 3522 (IGHV3-33)
AGEATDAMDV

SEQ ID NO: 7045 - protein, 9 aa, Homo sapiens
  Light chain CDR3 for antibody 3523 (IGKV1D-17)
LQHNSYPYT

SEQ ID NO: 7046 - protein, 13 aa, Homo sapiens
  Heavy chain CDR3 for antibody 3523 (IGHV3-33)
ARDWYYGSGSPYY

SEQ ID NO: 7047 - protein, 9 aa, Homo sapiens
  Light chain CDR3 for antibody 3524 (IGKV1-9)
QQLNSYPFT

SEQ ID NO: 7048 - protein, 17 aa, Homo sapiens
  Heavy chain CDR3 for antibody 3524 (IGHV3-33)
ARESTLVRGENYYGMDV

SEQ ID NO: 7049 - protein, 9 aa, Homo sapiens
  Light chain CDR3 for antibody 3525 (IGKV1-9)
QQFNSHPFT

SEQ ID NO: 7050 - protein, 10 aa, Homo sapiens
  Heavy chain CDR3 for antibody 3525 (IGHV3-33)
AREAVAGFDY

SEQ ID NO: 7051 - protein, 9 aa, Homo sapiens
  Light chain CDR3 for antibody 3526 (IGKV1-17)
LQHNSYPPT

SEQ ID NO: 7052 - protein, 21 aa, Homo sapiens
  Heavy chain CDR3 for antibody 3526 (IGHV3-11)
ARDRNYDILTGYYKGENYFDY

SEQ ID NO: 7053 - protein, 9 aa, Homo sapiens
  Light chain CDR3 for antibody 3527 (IGKV1D-17)
LQHNSYPYT

SEQ ID NO: 7054 - protein, 15 aa, Homo sapiens
  Heavy chain CDR3 for antibody 3527 (IGHV1-46)
AREKYYGSGSSPFDY

SEQ ID NO: 7055 - protein, 9 aa, Homo sapiens
  Light chain CDR3 for antibody 3528 (IGKV1-9)
QQLNSFPFT

SEQ ID NO: 7056 - protein, 17 aa, Homo sapiens
  Heavy chain CDR3 for antibody 3528 (IGHV3-74)
AREIPMVRGDNYSGMDV

SEQ ID NO: 7057 - protein, 9 aa, Homo sapiens
  Light chain CDR3 for antibody 3529 (IGKV1-27)
QKYNSAPLT

SEQ ID NO: 7058 - protein, 17 aa, Homo sapiens
  Heavy chain CDR3 for antibody 3529 (IGHV3-33)
AREITMVRGDNYYGMDV

SEQ ID NO: 7059 - protein, 9 aa, Homo sapiens
  Light chain CDR3 for antibody 3530 (IGKV1-9)
QHLNSHPFT

SEQ ID NO: 7060 - protein, 17 aa, Homo sapiens
  Heavy chain CDR3 for antibody 3530 (IGHV3-33)
AREIAMVRGDNYYGMDV

SEQ ID NO: 7061 - protein, 9 aa, Homo sapiens
  Light chain CDR3 for antibody 3531 (IGKV1-9)
QHLNSHPFT

SEQ ID NO: 7062 - protein, 10 aa, Homo sapiens
  Heavy chain CDR3 for antibody 3531 (IGHV3-33)
ARDSTYGMDV

SEQ ID NO: 7063 - protein, 9 aa, Homo sapiens
  Light chain CDR3 for antibody 3532 (IGKV1-9)
QQLISYPYT

SEQ ID NO: 7064 - protein, 15 aa, Homo sapiens
  Heavy chain CDR3 for antibody 3532 (IGHV1-46)
AREKDYGAGRYPFDS

SEQ ID NO: 7065 - protein, 9 aa, Homo sapiens
  Light chain CDR3 for antibody 3533 (IGKV1-9)
QQLISYPYT

SEQ ID NO: 7066 - protein, 5 aa, Homo sapiens
  Heavy chain CDR3 for antibody 3533 (IGHV1-46)
AREKY

SEQ ID NO: 7067 - protein, 9 aa, Homo sapiens
  Light chain CDR3 for antibody 3534 (IGKV1-9)
QQLNGYPYT

SEQ ID NO: 7068 - protein, 15 aa, Homo sapiens
  Heavy chain CDR3 for antibody 3534 (IGHV1-46)
AREDYYGSGSYPFDY

SEQ ID NO: 7069 - protein, 9 aa, Homo sapiens
  Light chain CDR3 for antibody 3535 (IGKV1D-17)
LQHNSYPYT

SEQ ID NO: 7070 - protein, 17 aa, Homo sapiens
  Heavy chain CDR3 for antibody 3535 (IGHV3-23)
AKGRGARGFYYYYGMDV

SEQ ID NO: 7071 - protein, 9 aa, Homo sapiens
  Light chain CDR3 for antibody 3536 (IGKV1-9)
QQLNSYPYT

SEQ ID NO: 7072 - protein, 15 aa, Homo sapiens
  Heavy chain CDR3 for antibody 3536 (IGHV1-46)
AREKYYGAGSYPLDS

SEQ ID NO: 7073 - protein, 9 aa, Homo sapiens
  Light chain CDR3 for antibody 3537 (IGKV1-9)
QQLNSYPFT

SEQ ID NO: 7074 - protein, 17 aa, Homo sapiens
  Heavy chain CDR3 for antibody 3537 (IGHV3-33)
AREITMVRGENYYGMDD

SEQ ID NO: 7075 - protein, 9 aa, Homo sapiens
  Light chain CDR3 for antibody 3538 (IGKV1-9)
QHLNSHPFT

SEQ ID NO: 7076 - protein, 17 aa, Homo sapiens
  Heavy chain CDR3 for antibody 3538 (IGHV3-33)
AREITMFRGENYYGLDV

SEQ ID NO: 7077 - protein, 9 aa, Homo sapiens
  Light chain CDR3 for antibody 3539 (IGKV1D-17)
LQHDSYPYT

SEQ ID NO: 7078 - protein, 10 aa, Homo sapiens
  Heavy chain CDR3 for antibody 3539 (IGHV3-33)
AGESTDGMDV

SEQ ID NO: 7079 - protein, 9 aa, Homo sapiens
  Light chain CDR3 for antibody 3540 (IGKV1-9)
HQLISYPYT

SEQ ID NO: 7080 - protein, 15 aa, Homo sapiens
  Heavy chain CDR3 for antibody 3540 (IGHV1-46)
AREKYYGSGSYPFEY

SEQ ID NO: 7081 - protein, 9 aa, Homo sapiens
  Light chain CDR3 for antibody 3541 (IGKV1-9)
QQLNSYPYT

SEQ ID NO: 7082 - protein, 15 aa, Homo sapiens
  Heavy chain CDR3 for antibody 3541 (IGHV1-46)
AREKCSGSGSYPFDS

SEQ ID NO: 7083 - protein, 9 aa, Homo sapiens
  Light chain CDR3 for antibody 3542 (IGKV1-9)
QQLNSYPFT

SEQ ID NO: 7084 - protein, 10 aa, Homo sapiens
  Heavy chain CDR3 for antibody 3542 (IGHV1-18)
ARSPYYDIDY

SEQ ID NO: 7085 - protein, 7 aa, Homo sapiens
  Light chain CDR3 for antibody 3543 (IGKV3D-7)
QQDYNLP

SEQ ID NO: 7086 - protein, 17 aa, Homo sapiens
  Heavy chain CDR3 for antibody 3543 (IGHV1-8)
ARREWFGSYYYYYGMDV

SEQ ID NO: 7087 - protein, 9 aa, Homo sapiens
  Light chain CDR3 for antibody 3544 (IGKV1-9)
QQLNSHPFT

SEQ ID NO: 7088 - protein, 10 aa, Homo sapiens
  Heavy chain CDR3 for antibody 3544 (IGHV3-33)
ARESSDAMDV

SEQ ID NO: 7089 - protein, 9 aa, Homo sapiens
  Light chain CDR3 for antibody 3545 (IGKV1D-17)
LQHNSYPYT

SEQ ID NO: 7090 - protein, 10 aa, Homo sapiens
  Heavy chain CDR3 for antibody 3545 (IGHV3-33)
ARESADGIDF

SEQ ID NO: 7091 - protein, 9 aa, Homo sapiens
  Light chain CDR3 for antibody 3546 (IGKV1-12)
QQRSNWQYT

SEQ ID NO: 7092 - protein, 10 aa, Homo sapiens
  Heavy chain CDR3 for antibody 3546 (IGHV3-23)
AKESWESFDY

SEQ ID NO: 7093 - protein, 9 aa, Homo sapiens
  Light chain CDR3 for antibody 3547 (IGKV1-9)
QQLISYPYT

SEQ ID NO: 7094 - protein, 15 aa, Homo sapiens
  Heavy chain CDR3 for antibody 3547 (IGHV1-46)
AIEKYYGSGSYPFDS

SEQ ID NO: 7095 - protein, 9 aa, Homo sapiens
  Light chain CDR3 for antibody 3548 (IGKV1-9)
QQLNSYPFT

SEQ ID NO: 7096 - protein, 17 aa, Homo sapiens
  Heavy chain CDR3 for antibody 3548 (IGHV3-30)
VREITMVRVDNYYALDV

SEQ ID NO: 7097 - protein, 9 aa, Homo sapiens
  Light chain CDR3 for antibody 3549 (IGKV1-17)
LQHNSYPYT

SEQ ID NO: 7098 - protein, 13 aa, Homo sapiens
  Heavy chain CDR3 for antibody 3549 (IGHV3-33)
ARGVLWFGELFDY

SEQ ID NO: 7099 - protein, 9 aa, Homo sapiens
  Light chain CDR3 for antibody 3550 (IGKV1-9)
QQFNSYPRT

SEQ ID NO: 7100 - protein, 17 aa, Homo sapiens
  Heavy chain CDR3 for antibody 3550 (IGHV3-13)
ARGRYNSGWYPFNWFDP

SEQ ID NO: 7101 - protein, 9 aa, Homo sapiens
  Light chain CDR3 for antibody 3551 (IGKV1D-17)
LQHNSYPYT

SEQ ID NO: 7102 - protein, 11 aa, Homo sapiens
  Heavy chain CDR3 for antibody 3551 (IGHV3-33)
ARDRRVGATDY

SEQ ID NO: 7103 - protein, 9 aa, Homo sapiens
  Light chain CDR3 for antibody 3552 (IGKV1D-17)
LQHNSYPYT

SEQ ID NO: 7104 - protein, 10 aa, Homo sapiens
  Heavy chain CDR3 for antibody 3552 (IGHV3-33)
TSESTDAMAV

SEQ ID NO: 7105 - protein, 9 aa, Homo sapiens
  Light chain CDR3 for antibody 3553 (IGKV1-9)
QQLNSYPYT

SEQ ID NO: 7106 - protein, 15 aa, Homo sapiens
  Heavy chain CDR3 for antibody 3553 (IGHV1-18)
AREKYDGAGSYPFDS

SEQ ID NO: 7107 - protein, 9 aa, Homo sapiens
  Light chain CDR3 for antibody 3554 (IGKV1-9)
QQLNSYPFT

SEQ ID NO: 7108 - protein, 14 aa, Homo sapiens
  Heavy chain CDR3 for antibody 3554 (IGHV3-23)
AKDRAVAGTYYFDY

SEQ ID NO: 7109 - protein, 9 aa, Homo sapiens
  Light chain CDR3 for antibody 3555 (IGKV1-9)
HQLNSYPYT

SEQ ID NO: 7110 - protein, 15 aa, Homo sapiens
  Heavy chain CDR3 for antibody 3555 (IGHV1-46)
AREKYYGSGSYPFDS

SEQ ID NO: 7111 - protein, 9 aa, Homo sapiens
  Light chain CDR3 for antibody 3556 (IGKV1-9)
QQLNSYPFT

SEQ ID NO: 7112 - protein, 17 aa, Homo sapiens
  Heavy chain CDR3 for antibody 3556 (IGHV3-33)
AREITMVRGDNSSGMEV

SEQ ID NO: 7113 - protein, 9 aa, Homo sapiens
  Light chain CDR3 for antibody 3557 (IGKV1-17)
LQHNSYPWT

SEQ ID NO: 7114 - protein, 13 aa, Homo sapiens
  Heavy chain CDR3 for antibody 3557 (IGHV3-64)
ARETGDSYYGMDV

SEQ ID NO: 7115 - protein, 9 aa, Homo sapiens
  Light chain CDR3 for antibody 3558 (IGKV1D-17)
LQHNSYPYT

SEQ ID NO: 7116 - protein, 10 aa, Homo sapiens
  Heavy chain CDR3 for antibody 3558 (IGHV3-33)
ARETVAGFAS

SEQ ID NO: 7117 - protein, 9 aa, Homo sapiens
  Light chain CDR3 for antibody 3559 (IGKV1D-17)
LQHNSYPYT

SEQ ID NO: 7118 - protein, 10 aa, Homo sapiens
  Heavy chain CDR3 for antibody 3559 (IGHV3-30)
AREYPDGMDV

SEQ ID NO: 7119 - protein, 9 aa, Homo sapiens
  Light chain CDR3 for antibody 3560 (IGKV1-9)
QQLNSHPFT

SEQ ID NO: 7120 - protein, 17 aa, Homo sapiens
  Heavy chain CDR3 for antibody 3560 (IGHV3-30)
AREITMVRGDNYYAIAV

SEQ ID NO: 7121 - protein, 9 aa, Homo sapiens
  Light chain CDR3 for antibody 3561 (IGKV1-9)
QQLNSFPFT

SEQ ID NO: 7122 - protein, 17 aa, Homo sapiens
  Heavy chain CDR3 for antibody 3561 (IGHV3-11)
EREITMDRGDNYYGMDV

SEQ ID NO: 7123 - protein, 9 aa, Homo sapiens
  Light chain CDR3 for antibody 3562 (IGKV1-9)
QQLNSYPYT

SEQ ID NO: 7124 - protein, 15 aa, Homo sapiens
  Heavy chain CDR3 for antibody 3562 (IGHV1-46)
AREKSYVSGRYPFAY

SEQ ID NO: 7125 - protein, 9 aa, Homo sapiens
  Light chain CDR3 for antibody 3563 (IGKV1-9)
QQLNGYPYT

SEQ ID NO: 7126 - protein, 17 aa, Homo sapiens
  Heavy chain CDR3 for antibody 3563 (IGHV3-33)
VREITMVRGDNYYGLDV

SEQ ID NO: 7127 - protein, 9 aa, Homo sapiens
  Light chain CDR3 for antibody 3564 (IGKV6-21)
HQSSSLPYT

SEQ ID NO: 7128 - protein, 15 aa, Homo sapiens
  Heavy chain CDR3 for antibody 3564 (IGHV1-46)
AREKYYGSGSYPFDY

SEQ ID NO: 7129 - protein, 9 aa, Homo sapiens
  Light chain CDR3 for antibody 3565 (IGKV1-27)
QKYNSAPLT

SEQ ID NO: 7130 - protein, 15 aa, Homo sapiens
  Heavy chain CDR3 for antibody 3565 (IGHV1-46)
AREKYYGSGSYPFDY

SEQ ID NO: 7131 - protein, 9 aa, Homo sapiens
  Light chain CDR3 for antibody 3566 (IGKV1D-17)
LQHNSYPYT

SEQ ID NO: 7132 - protein, 10 aa, Homo sapiens
  Heavy chain CDR3 for antibody 3566 (IGHV3-33)
AIESTDGMNA

SEQ ID NO: 7133 - protein, 9 aa, Homo sapiens
  Light chain CDR3 for antibody 3567 (IGKV1-9)
HQLNSYPYT

SEQ ID NO: 7134 - protein, 15 aa, Homo sapiens
  Heavy chain CDR3 for antibody 3567 (IGHV1-46)
AREKYYGSGSYPIEY

SEQ ID NO: 7135 - protein, 9 aa, Homo sapiens
  Light chain CDR3 for antibody 3568 (IGKV1-9)
QQLNSYPFT

SEQ ID NO: 7136 - protein, 27 aa, Homo sapiens
  Heavy chain CDR3 for antibody 3568 (IGHV3-20)
VRDRHIVVVTADSREDSYYYYYYGMDV

SEQ ID NO: 7137 - protein, 9 aa, Homo sapiens
  Light chain CDR3 for antibody 3569 (IGKV1-9)
LQHDSYPYT

SEQ ID NO: 7138 - protein, 10 aa, Homo sapiens
  Heavy chain CDR3 for antibody 3569 (IGHV3-33)
ARESAYGMDV

SEQ ID NO: 7139 - protein, 9 aa, Homo sapiens
  Light chain CDR3 for antibody 3570 (IGKV1-9)
QHLNSHPFT

SEQ ID NO: 7140 - protein, 17 aa, Homo sapiens
  Heavy chain CDR3 for antibody 3570 (IGHV3-33)
AREITMLRGDNYYGLEV

SEQ ID NO: 7141 - protein, 9 aa, Homo sapiens
  Light chain CDR3 for antibody 3571 (IGKV1-9)
QQLNSYPFT

SEQ ID NO: 7142 - protein, 17 aa, Homo sapiens
  Heavy chain CDR3 for antibody 3571 (IGHV3-53)
AREITMVRGANSYGMDA

SEQ ID NO: 7143 - protein, 9 aa, Homo sapiens
  Light chain CDR3 for antibody 3572 (IGKV1-6)
LQDYNYPWT

SEQ ID NO: 7144 - protein, 27 aa, Homo sapiens
  Heavy chain CDR3 for antibody 3572 (IGHV3-20)
ARDRHIVVVTADIREDSYYYYYYGMDV

SEQ ID NO: 7145 - protein, 9 aa, Homo sapiens
  Light chain CDR3 for antibody 3573 (IGKV1-9)
QQLNSYPFT

SEQ ID NO: 7146 - protein, 13 aa, Homo sapiens
  Heavy chain CDR3 for antibody 3573 (IGHV3-33)
ARDWYYGSGSPYY

SEQ ID NO: 7147 - protein, 9 aa, Homo sapiens
  Light chain CDR3 for antibody 3574 (IGKV1-9)
QQLNSYPFT

SEQ ID NO: 7148 - protein, 10 aa, Homo sapiens
  Heavy chain CDR3 for antibody 3574 (IGHV3-33)
ARESTDAIDA

SEQ ID NO: 7149 - protein, 9 aa, Homo sapiens
  Light chain CDR3 for antibody 3575 (IGKV1-9)
QQLNSHPFT

SEQ ID NO: 7150 - protein, 17 aa, Homo sapiens
  Heavy chain CDR3 for antibody 3575 (IGHV3-30)
AREMTMVRGHNYYGMDD

SEQ ID NO: 7151 - protein, 9 aa, Homo sapiens
  Light chain CDR3 for antibody 3576 (IGKV1D-17)
LQHNSYPYT

SEQ ID NO: 7152 - protein, 10 aa, Homo sapiens
  Heavy chain CDR3 for antibody 3576 (IGHV3-33)
AREATDAMDV

SEQ ID NO: 7153 - protein, 9 aa, Homo sapiens
  Light chain CDR3 for antibody 3577 (IGKV1-9)
QQLNSYPFT

SEQ ID NO: 7154 - protein, 17 aa, Homo sapiens
  Heavy chain CDR3 for antibody 3577 (IGHV3-33)
AREITMVRVANSSGMDV

SEQ ID NO: 7155 - protein, 9 aa, Homo sapiens
  Light chain CDR3 for antibody 3578 (IGKV1-9)
QQFNSHPFT

SEQ ID NO: 7156 - protein, 17 aa, Homo sapiens
  Heavy chain CDR3 for antibody 3578 (IGHV3-30)
AREITMVRVYNYYALDV

SEQ ID NO: 7157 - protein, 9 aa, Homo sapiens
  Light chain CDR3 for antibody 3579 (IGKV1-8)
QQYYSYPYT

SEQ ID NO: 7158 - protein, 14 aa, Homo sapiens
  Heavy chain CDR3 for antibody 3579 (IGHV3-23)
AKERAVAGLNGFAP

SEQ ID NO: 7159 - protein, 9 aa, Homo sapiens
  Light chain CDR3 for antibody 3580 (IGKV1D-17)
LQHNSYPWT

SEQ ID NO: 7160 - protein, 9 aa, Homo sapiens
  Heavy chain CDR3 for antibody 3580 (IGHV3-66)
AREGAGIES

SEQ ID NO: 7161 - protein, 9 aa, Homo sapiens
  Light chain CDR3 for antibody 3581 (IGKV1-9)
QQLNSYPFT

SEQ ID NO: 7162 - protein, 17 aa, Homo sapiens
  Heavy chain CDR3 for antibody 3581 (IGHV3-13)
AREMTMGRGDNYDGLDV

SEQ ID NO: 7163 - protein, 9 aa, Homo sapiens
  Light chain CDR3 for antibody 3582 (IGKV1D-17)
LQHNSYPYT

SEQ ID NO: 7164 - protein, 13 aa, Homo sapiens
  Heavy chain CDR3 for antibody 3582 (IGHV3-33)
ARDYCGGDCYPDP

SEQ ID NO: 7165 - protein, 9 aa, Homo sapiens
  Light chain CDR3 for antibody 3583 (IGKV1-9)
QHLNSHPFT

SEQ ID NO: 7166 - protein, 17 aa, Homo sapiens
  Heavy chain CDR3 for antibody 3583 (IGHV3-30)
AREITMVRGDNYYALDA

SEQ ID NO: 7167 - protein, 9 aa, Homo sapiens
  Light chain CDR3 for antibody 3584 (IGKV1-9)
QQLISYPYT

SEQ ID NO: 7168 - protein, 15 aa, Homo sapiens
  Heavy chain CDR3 for antibody 3584 (IGHV1-46)
AREKYYGSGSYPFAS

SEQ ID NO: 7169 - protein, 9 aa, Homo sapiens
  Light chain CDR3 for antibody 3585 (IGKV1-9)
QQLNSYPFT

SEQ ID NO: 7170 - protein, 17 aa, Homo sapiens
  Heavy chain CDR3 for antibody 3585 (IGHV3-33)
ARESNMVRGDNSYGMAV

SEQ ID NO: 7171 - protein, 9 aa, Homo sapiens
  Light chain CDR3 for antibody 3586 (IGKV1-9)
QQLNGYPYT

SEQ ID NO: 7172 - protein, 15 aa, Homo sapiens
  Heavy chain CDR3 for antibody 3586 (IGHV1-46)
ARERCYGSGSYPFDY

SEQ ID NO: 7173 - protein, 9 aa, Homo sapiens
  Light chain CDR3 for antibody 3587 (IGKV1-9)
QQLNSYPFT

SEQ ID NO: 7174 - protein, 17 aa, Homo sapiens
  Heavy chain CDR3 for antibody 3587 (IGHV3-33)
VREITMVRGDNYYGLAV

SEQ ID NO: 7175 - protein, 9 aa, Homo sapiens
  Light chain CDR3 for antibody 3588 (IGKV1D-17)
LQHNSYPYT

SEQ ID NO: 7176 - protein, 10 aa, Homo sapiens
  Heavy chain CDR3 for antibody 3588 (IGHV3-33)
AREATDGMAD

SEQ ID NO: 7177 - protein, 9 aa, Homo sapiens
  Light chain CDR3 for antibody 3589 (IGKV1-9)
QQFNSYPFT

SEQ ID NO: 7178 - protein, 17 aa, Homo sapiens
  Heavy chain CDR3 for antibody 3589 (IGHV3-33)
AREITWVRGDNYYGMDV

SEQ ID NO: 7179 - protein, 9 aa, Homo sapiens
  Light chain CDR3 for antibody 3590 (IGKV1-9)
QQLNSYPFT

SEQ ID NO: 7180 - protein, 17 aa, Homo sapiens
  Heavy chain CDR3 for antibody 3590 (IGHV3-33)
EREITKVRGDNYYGMDF

SEQ ID NO: 7181 - protein, 9 aa, Homo sapiens
  Light chain CDR3 for antibody 3591 (IGKV1-9)
QQLNSYPYT

SEQ ID NO: 7182 - protein, 15 aa, Homo sapiens
  Heavy chain CDR3 for antibody 3591 (IGHV1-46)
VRKKYYGSGTYPFDY

SEQ ID NO: 7183 - protein, 9 aa, Homo sapiens
  Light chain CDR3 for antibody 3592 (IGKV1-9)
QQLNSHPFT

SEQ ID NO: 7184 - protein, 17 aa, Homo sapiens
  Heavy chain CDR3 for antibody 3592 (IGHV3-33)
AREITKVRGDNCYGMDD

SEQ ID NO: 7185 - protein, 9 aa, Homo sapiens
  Light chain CDR3 for antibody 3593 (IGKV1-9)
QQLNSYPFT

SEQ ID NO: 7186 - protein, 17 aa, Homo sapiens
  Heavy chain CDR3 for antibody 3593 (IGHV3-33)
ARESTMVRGDNYYGMDA

SEQ ID NO: 7187 - protein, 9 aa, Homo sapiens
  Light chain CDR3 for antibody 3594 (IGKV3-15)
QQYNNWPRT

SEQ ID NO: 7188 - protein, 16 aa, Homo sapiens
  Heavy chain CDR3 for antibody 3594 (IGHV3-66)
ARDRDMVGTGEYCFDY

SEQ ID NO: 7189 - protein, 9 aa, Homo sapiens
  Light chain CDR3 for antibody 3595 (IGKV1-9)
QQLNSYPFT

SEQ ID NO: 7190 - protein, 17 aa, Homo sapiens
  Heavy chain CDR3 for antibody 3595 (IGHV3-33)
ARESTMIRGDNSYGMDV

SEQ ID NO: 7191 - protein, 9 aa, Homo sapiens
  Light chain CDR3 for antibody 3596 (IGKV1D-17)
LQHNSYPYT

SEQ ID NO: 7192 - protein, 10 aa, Homo sapiens
  Heavy chain CDR3 for antibody 3596 (IGHV3-33)
SRESFSGFDY

SEQ ID NO: 7193 - protein, 9 aa, Homo sapiens
  Light chain CDR3 for antibody 3597 (IGKV1-9)
QQLNSYPFT

SEQ ID NO: 7194 - protein, 17 aa, Homo sapiens
  Heavy chain CDR3 for antibody 3597 (IGHV3-30)
EREITMVRGANYYAMDV

SEQ ID NO: 7195 - protein, 9 aa, Homo sapiens
  Light chain CDR3 for antibody 3598 (IGKV1-27)
QKYNSAPYT

SEQ ID NO: 7196 - protein, 17 aa, Homo sapiens
  Heavy chain CDR3 for antibody 3598 (IGHV3-33)
AREITMVRGDNYYGLDV

SEQ ID NO: 7197 - protein, 9 aa, Homo sapiens
  Light chain CDR3 for antibody 3599 (IGKV1-9)
QHLNSHPFT

SEQ ID NO: 7198 - protein, 17 aa, Homo sapiens
  Heavy chain CDR3 for antibody 3599 (IGHV3-7)
AGEITMVRGDNYYGLDV

SEQ ID NO: 7199 - protein, 9 aa, Homo sapiens
  Light chain CDR3 for antibody 3600 (IGKV1-9)
QQLNSYPFT

SEQ ID NO: 7200 - protein, 17 aa, Homo sapiens
  Heavy chain CDR3 for antibody 3600 (IGHV3-33)
ARAITMGRGDNYYGMDV

SEQ ID NO: 7201 - protein, 9 aa, Homo sapiens
  Light chain CDR3 for antibody 3601 (IGKV1-9)
QHLNSHPFT

SEQ ID NO: 7202 - protein, 17 aa, Homo sapiens
  Heavy chain CDR3 for antibody 3601 (IGHV3-23)
EREITRVRGYNYYGMDV

SEQ ID NO: 7203 - protein, 9 aa, Homo sapiens
  Light chain CDR3 for antibody 3602 (IGKV1-9)
QQLNSYPYT

SEQ ID NO: 7204 - protein, 15 aa, Homo sapiens
  Heavy chain CDR3 for antibody 3602 (IGHV1-46)
TREKYYGSGTYPFAY

SEQ ID NO: 7205 - protein, 9 aa, Homo sapiens
  Light chain CDR3 for antibody 3603 (IGKV1-9)
QQLNSHPFT

SEQ ID NO: 7206 - protein, 17 aa, Homo sapiens
  Heavy chain CDR3 for antibody 3603 (IGHV3-33)
AREITMERGYNYYGMDV

SEQ ID NO: 7207 - protein, 9 aa, Homo sapiens
  Light chain CDR3 for antibody 3604 (IGKV1-9)
QQLISYPYT

SEQ ID NO: 7208 - protein, 15 aa, Homo sapiens
  Heavy chain CDR3 for antibody 3604 (IGHV1-46)
ARQKYYGSASYPFDY

SEQ ID NO: 7209 - protein, 9 aa, Homo sapiens
  Light chain CDR3 for antibody 3605 (IGKV1-9)
HQLNSYPYT

SEQ ID NO: 7210 - protein, 15 aa, Homo sapiens
  Heavy chain CDR3 for antibody 3605 (IGHV1-46)
AREKYQGSGSYPFDD

SEQ ID NO: 7211 - protein, 9 aa, Homo sapiens
  Light chain CDR3 for antibody 3606 (IGKV1D-17)
LQHNSYPYT

SEQ ID NO: 7212 - protein, 19 aa, Homo sapiens
  Heavy chain CDR3 for antibody 3606 (IGHV1-18)
ARDHGYCSSTSCYRAWFDP

SEQ ID NO: 7213 - protein, 9 aa, Homo sapiens
  Light chain CDR3 for antibody 3607 (IGKV1D-17)
LQHNSYPYT

SEQ ID NO: 7214 - protein, 10 aa, Homo sapiens
  Heavy chain CDR3 for antibody 3607 (IGHV3-33)
AREATDAMDD

SEQ ID NO: 7215 - protein, 9 aa, Homo sapiens
  Light chain CDR3 for antibody 3608 (IGKV3-15)
QQYNNWPLT

SEQ ID NO: 7216 - protein, 14 aa, Homo sapiens
  Heavy chain CDR3 for antibody 3608 (IGHV3-23)
AKEIAVAGHWYFDL

SEQ ID NO: 7217 - protein, 9 aa, Homo sapiens
  Light chain CDR3 for antibody 3609 (IGKV1-9)
HQLNSYPYT

SEQ ID NO: 7218 - protein, 15 aa, Homo sapiens
  Heavy chain CDR3 for antibody 3609 (IGHV1-46)
AREKYHGSGSDPFDY

SEQ ID NO: 7219 - protein, 9 aa, Homo sapiens
  Light chain CDR3 for antibody 3610 (IGKV1-9)
QQLNSYPFT

SEQ ID NO: 7220 - protein, 17 aa, Homo sapiens
  Heavy chain CDR3 for antibody 3610 (IGHV3-33)
EREITLVRGDNYYSMDV

SEQ ID NO: 7221 - protein, 9 aa, Homo sapiens
  Light chain CDR3 for antibody 3611 (IGKV1-8)
QQYYSYPYT

SEQ ID NO: 7222 - protein, 10 aa, Homo sapiens
  Heavy chain CDR3 for antibody 3611 (IGHV3-33)
ARETVAGFDY

SEQ ID NO: 7223 - protein, 9 aa, Homo sapiens
  Light chain CDR3 for antibody 3612 (IGKV1-9)
QHLNSHPFT

SEQ ID NO: 7224 - protein, 17 aa, Homo sapiens
  Heavy chain CDR3 for antibody 3612 (IGHV3-33)
AREINMGRGDNYYGMDG

SEQ ID NO: 7225 - protein, 9 aa, Homo sapiens
  Light chain CDR3 for antibody 3613 (IGKV1-9)
QQLNSHPFT

SEQ ID NO: 7226 - protein, 17 aa, Homo sapiens
  Heavy chain CDR3 for antibody 3613 (IGHV3-30)
AREMTMGRGDNSYGMDV

SEQ ID NO: 7227 - protein, 9 aa, Homo sapiens
  Light chain CDR3 for antibody 3614 (IGKV1D-17)
LQHNSYPYT

SEQ ID NO: 7228 - protein, 17 aa, Homo sapiens
  Heavy chain CDR3 for antibody 3614 (IGHV3-33)
AREIAMVRGDDCYGMDD

SEQ ID NO: 7229 - protein, 9 aa, Homo sapiens
  Light chain CDR3 for antibody 3615 (IGKV1-9)
QQLISYPFT

SEQ ID NO: 7230 - protein, 17 aa, Homo sapiens
  Heavy chain CDR3 for antibody 3615 (IGHV3-33)
AREITLVRGDTYYGMYV

SEQ ID NO: 7231 - protein, 9 aa, Homo sapiens
  Light chain CDR3 for antibody 3616 (IGKV1-9)
QQLNSYPFT

SEQ ID NO: 7232 - protein, 18 aa, Homo sapiens
  Heavy chain CDR3 for antibody 3616 (IGHV3-11)
ARYGDPERDYYYYYGMDV

SEQ ID NO: 7233 - protein, 9 aa, Homo sapiens
  Light chain CDR3 for antibody 3617 (IGKV1D-17)
LQHNSYPYT

SEQ ID NO: 7234 - protein, 10 aa, Homo sapiens
  Heavy chain CDR3 for antibody 3617 (IGHV3-33)
TSESSYGMDV

SEQ ID NO: 7235 - protein, 9 aa, Homo sapiens
  Light chain CDR3 for antibody 3618 (IGKV1D-17)
LQHNSYPYT

SEQ ID NO: 7236 - protein, 10 aa, Homo sapiens
  Heavy chain CDR3 for antibody 3618 (IGHV3-33)
AIESTYGMYV

SEQ ID NO: 7237 - protein, 9 aa, Homo sapiens
  Light chain CDR3 for antibody 3619 (IGKV1-6)
LQDYDYPWT

SEQ ID NO: 7238 - protein, 18 aa, Homo sapiens
  Heavy chain CDR3 for antibody 3619 (IGHV3-11)
ARYGDPERDDYYYYGMEV

SEQ ID NO: 7239 - protein, 9 aa, Homo sapiens
  Light chain CDR3 for antibody 3620 (IGKV1-9)
QQLNSYPFT

SEQ ID NO: 7240 - protein, 17 aa, Homo sapiens
  Heavy chain CDR3 for antibody 3620 (IGHV3-30)
EREITMGRGENYYGMDV

SEQ ID NO: 7241 - protein, 9 aa, Homo sapiens
  Light chain CDR3 for antibody 3621 (IGKV1-9)
QQLNSHPFT

SEQ ID NO: 7242 - protein, 17 aa, Homo sapiens
  Heavy chain CDR3 for antibody 3621 (IGHV3-30)
EREITMARGDNYYGMDD

SEQ ID NO: 7243 - protein, 9 aa, Homo sapiens
  Light chain CDR3 for antibody 3622 (IGKV1-9)
QQFNSYPFT

SEQ ID NO: 7244 - protein, 17 aa, Homo sapiens
  Heavy chain CDR3 for antibody 3622 (IGHV3-64)
WREITMFRGDNYYGIDV

SEQ ID NO: 7245 - protein, 9 aa, Homo sapiens
  Light chain CDR3 for antibody 3623 (IGKV1-9)
QQLISYPYT

SEQ ID NO: 7246 - protein, 15 aa, Homo sapiens
  Heavy chain CDR3 for antibody 3623 (IGHV1-46)
AREKYYVSESYPFDS

SEQ ID NO: 7247 - protein, 9 aa, Homo sapiens
  Light chain CDR3 for antibody 3624 (IGKV1-9)
QQLNSYPFT

SEQ ID NO: 7248 - protein, 17 aa, Homo sapiens
  Heavy chain CDR3 for antibody 3624 (IGHV3-33)
AREINMFRGDTYYGMDV

SEQ ID NO: 7249 - protein, 9 aa, Homo sapiens
  Light chain CDR3 for antibody 3625 (IGKV1-9)
QQFNSYPFT

SEQ ID NO: 7250 - protein, 17 aa, Homo sapiens
  Heavy chain CDR3 for antibody 3625 (IGHV3-33)
ARESTLVRGDTYYGMDV

SEQ ID NO: 7251 - protein, 9 aa, Homo sapiens
  Light chain CDR3 for antibody 3626 (IGKV1-9)
QQLNSHPFT

SEQ ID NO: 7252 - protein, 17 aa, Homo sapiens
  Heavy chain CDR3 for antibody 3626 (IGHV3-33)
AREIPMGRGDNSYGLDV

SEQ ID NO: 7253 - protein, 9 aa, Homo sapiens
  Light chain CDR3 for antibody 3627 (IGKV1-9)
HQLISYPYT

SEQ ID NO: 7254 - protein, 10 aa, Homo sapiens
  Heavy chain CDR3 for antibody 3627 (IGHV3-33)
AREGRTGFEY

SEQ ID NO: 7255 - protein, 9 aa, Homo sapiens
  Light chain CDR3 for antibody 3628 (IGKV1D-17)
LQHNSYPYT

SEQ ID NO: 7256 - protein, 10 aa, Homo sapiens
  Heavy chain CDR3 for antibody 3628 (IGHV3-33)
ASASTDGIDA

SEQ ID NO: 7257 - protein, 9 aa, Homo sapiens
  Light chain CDR3 for antibody 3629 (IGKV1-9)
QQFNSYPFT

SEQ ID NO: 7258 - protein, 17 aa, Homo sapiens
  Heavy chain CDR3 for antibody 3629 (IGHV3-33)
EREIPRVRGENYYGLDV

SEQ ID NO: 7259 - protein, 9 aa, Homo sapiens
  Light chain CDR3 for antibody 3630 (IGKV1-9)
QQLNSYPYT

SEQ ID NO: 7260 - protein, 15 aa, Homo sapiens
  Heavy chain CDR3 for antibody 3630 (IGHV1-46)
AIEKYYVSGSYPFNY

SEQ ID NO: 7261 - protein, 9 aa, Homo sapiens
  Light chain CDR3 for antibody 3631 (IGKV1D-17)
LQHNSYPYT

SEQ ID NO: 7262 - protein, 10 aa, Homo sapiens
  Heavy chain CDR3 for antibody 3631 (IGHV3-33)
ASDPTDGMDV

SEQ ID NO: 7263 - protein, 9 aa, Homo sapiens
  Light chain CDR3 for antibody 3632 (IGKV1D-17)
QQLNSYPFT

SEQ ID NO: 7264 - protein, 17 aa, Homo sapiens
  Heavy chain CDR3 for antibody 3632 (IGHV3-33)
AREITMVRGDTSYAMDV

SEQ ID NO: 7265 - protein, 9 aa, Homo sapiens
  Light chain CDR3 for antibody 3633 (IGKV1-9)
QQLNSYPYT

SEQ ID NO: 7266 - protein, 15 aa, Homo sapiens
  Heavy chain CDR3 for antibody 3633 (IGHV1-46)
AGEKYYGSGSYPFAY

SEQ ID NO: 7267 - protein, 9 aa, Homo sapiens
  Light chain CDR3 for antibody 3634 (IGKV1D-17)
LQHNSYPYT

SEQ ID NO: 7268 - protein, 13 aa, Homo sapiens
  Heavy chain CDR3 for antibody 3634 (IGHV3-23)
AKGPITISLYFDY

SEQ ID NO: 7269 - protein, 9 aa, Homo sapiens
  Light chain CDR3 for antibody 3635 (IGKV1-9)
QQLNSYPFT

SEQ ID NO: 7270 - protein, 17 aa, Homo sapiens
  Heavy chain CDR3 for antibody 3635 (IGHV3-33)
AREITMGRGDNDYGMDV

SEQ ID NO: 7271 - protein, 9 aa, Homo sapiens
  Light chain CDR3 for antibody 3636 (IGKV1-9)
QQLNGYPYT

SEQ ID NO: 7272 - protein, 17 aa, Homo sapiens
  Heavy chain CDR3 for antibody 3636 (IGHV1-46)
AREITMVRGDDYYGMDV

SEQ ID NO: 7273 - protein, 9 aa, Homo sapiens
  Light chain CDR3 for antibody 3637 (IGKV1-9)
QQLNSYPFT

SEQ ID NO: 7274 - protein, 17 aa, Homo sapiens
  Heavy chain CDR3 for antibody 3637 (IGHV3-33)
ARESTMVRGDDCYGLDV

SEQ ID NO: 7275 - protein, 9 aa, Homo sapiens
  Light chain CDR3 for antibody 3638 (IGKV1-9)
HQLNSYPYT

SEQ ID NO: 7276 - protein, 15 aa, Homo sapiens
  Heavy chain CDR3 for antibody 3638 (IGHV1-46)
AREKYQGSGSYPIAY

SEQ ID NO: 7277 - protein, 9 aa, Homo sapiens
  Light chain CDR3 for antibody 3639 (IGKV1D-17)
LQHNSYPYT

SEQ ID NO: 7278 - protein, 10 aa, Homo sapiens
  Heavy chain CDR3 for antibody 3639 (IGHV3-33)
SRASTDGIDV

SEQ ID NO: 7279 - protein, 9 aa, Homo sapiens
  Light chain CDR3 for antibody 3640 (IGKV1-9)
QQLNGYPYT

SEQ ID NO: 7280 - protein, 15 aa, Homo sapiens
  Heavy chain CDR3 for antibody 3640 (IGHV1-46)
AIYKYYGSASYPFDY

SEQ ID NO: 7281 - protein, 9 aa, Homo sapiens
  Light chain CDR3 for antibody 3641 (IGKV1-9)
QQFNSHPFT

SEQ ID NO: 7282 - protein, 10 aa, Homo sapiens
  Heavy chain CDR3 for antibody 3641 (IGHV3-33)
ARESSDGIDA

SEQ ID NO: 7283 - protein, 9 aa, Homo sapiens
  Light chain CDR3 for antibody 3642 (IGKV1D-17)
LQHDSYPYT

SEQ ID NO: 7284 - protein, 10 aa, Homo sapiens
  Heavy chain CDR3 for antibody 3642 (IGHV3-33)
AIDSTDGMAV

SEQ ID NO: 7285 - protein, 9 aa, Homo sapiens
  Light chain CDR3 for antibody 3643 (IGKV1-9)
QQFNSHPFT

SEQ ID NO: 7286 - protein, 17 aa, Homo sapiens
  Heavy chain CDR3 for antibody 3643 (IGHV3-33)
EREMTMVRGDNYYGMDV

SEQ ID NO: 7287 - protein, 9 aa, Homo sapiens
  Light chain CDR3 for antibody 3644 (IGKV1-9)
QQFNSHPFT

SEQ ID NO: 7288 - protein, 17 aa, Homo sapiens
  Heavy chain CDR3 for antibody 3644 (IGHV3-33)
AREINMVRGDDYYGLDV

SEQ ID NO: 7289 - protein, 9 aa, Homo sapiens
  Light chain CDR3 for antibody 3645 (IGKV1-9)
QQFNSYPFT

SEQ ID NO: 7290 - protein, 17 aa, Homo sapiens
  Heavy chain CDR3 for antibody 3645 (IGHV3-33)
AREITLVRGANYYGMDV

SEQ ID NO: 7291 - protein, 9 aa, Homo sapiens
  Light chain CDR3 for antibody 3646 (IGKV1-9)
QQLNSYPFT

SEQ ID NO: 7292 - protein, 13 aa, Homo sapiens
  Heavy chain CDR3 for antibody 3646 (IGHV3-23)
AKGPITISLYFDY

SEQ ID NO: 7293 - protein, 9 aa, Homo sapiens
  Light chain CDR3 for antibody 3647 (IGKV1-9)
QQLNSHPFT

SEQ ID NO: 7294 - protein, 17 aa, Homo sapiens
  Heavy chain CDR3 for antibody 3647 (IGHV3-74)
EREGTMDRGDSYYGLDV

SEQ ID NO: 7295 - protein, 9 aa, Homo sapiens
  Light chain CDR3 for antibody 3648 (IGKV1D-17)
LQHNSYPYT

SEQ ID NO: 7296 - protein, 10 aa, Homo sapiens
  Heavy chain CDR3 for antibody 3648 (IGHV3-33)
AIYSTAGMDA

SEQ ID NO: 7297 - protein, 9 aa, Homo sapiens
  Light chain CDR3 for antibody 3649 (IGKV1-9)
QQLNSYPFT

SEQ ID NO: 7298 - protein, 17 aa, Homo sapiens
  Heavy chain CDR3 for antibody 3649 (IGHV3-33)
AREITMFRGANSYCMDV

SEQ ID NO: 7299 - protein, 9 aa, Homo sapiens
  Light chain CDR3 for antibody 3650 (IGKV1D-17)
LQHNSYPYT

SEQ ID NO: 7300 - protein, 10 aa, Homo sapiens
  Heavy chain CDR3 for antibody 3650 (IGHV3-33)
AIESPAGIDV

SEQ ID NO: 7301 - protein, 9 aa, Homo sapiens
  Light chain CDR3 for antibody 3651 (IGKV1D-17)
LQHNSYPFT

SEQ ID NO: 7302 - protein, 17 aa, Homo sapiens
  Heavy chain CDR3 for antibody 3651 (IGHV3-33)
AREITMVRGDTYYGLDV

SEQ ID NO: 7303 - protein, 9 aa, Homo sapiens
  Light chain CDR3 for antibody 3652 (IGKV1D-17)
LQHNSYPYT

SEQ ID NO: 7304 - protein, 10 aa, Homo sapiens
  Heavy chain CDR3 for antibody 3652 (IGHV3-33)
ASESTYGMEV

SEQ ID NO: 7305 - protein, 9 aa, Homo sapiens
  Light chain CDR3 for antibody 3653 (IGKV1-9)
QQLNSYPFT

SEQ ID NO: 7306 - protein, 17 aa, Homo sapiens
  Heavy chain CDR3 for antibody 3653 (IGHV3-33)
AREINMARGDNYYGMEV

SEQ ID NO: 7307 - protein, 9 aa, Homo sapiens
  Light chain CDR3 for antibody 3654 (IGKV1-9)
QQLNSYPFT

SEQ ID NO: 7308 - protein, 17 aa, Homo sapiens
  Heavy chain CDR3 for antibody 3654 (IGHV3-33)
AREITMGRGDNYHGIDV

SEQ ID NO: 7309 - protein, 9 aa, Homo sapiens
  Light chain CDR3 for antibody 3655 (IGKV1-9)
QQLNSYPFT

SEQ ID NO: 7310 - protein, 15 aa, Homo sapiens
  Heavy chain CDR3 for antibody 3655 (IGHV1-46)
AREKYYGAGSYPFDA

SEQ ID NO: 7311 - protein, 9 aa, Homo sapiens
  Light chain CDR3 for antibody 3656 (IGKV1-9)
HQLISYPYT

SEQ ID NO: 7312 - protein, 15 aa, Homo sapiens
  Heavy chain CDR3 for antibody 3656 (IGHV1-46)
AREKYYGSASYPFAY

SEQ ID NO: 7313 - protein, 9 aa, Homo sapiens
  Light chain CDR3 for antibody 3657 (IGKV1D-17)
LQHNSYPYT

SEQ ID NO: 7314 - protein, 10 aa, Homo sapiens
  Heavy chain CDR3 for antibody 3657 (IGHV3-33)
ARETVSWFDY

SEQ ID NO: 7315 - protein, 9 aa, Homo sapiens
  Light chain CDR3 for antibody 3658 (IGKV1D-17)
LQHNSYPYT

SEQ ID NO: 7316 - protein, 10 aa, Homo sapiens
  Heavy chain CDR3 for antibody 3658 (IGHV3-66)
ARESGEGLDS

SEQ ID NO: 7317 - protein, 9 aa, Homo sapiens
  Light chain CDR3 for antibody 3659 (IGKV1-9)
HQLNSYPYT

SEQ ID NO: 7318 - protein, 15 aa, Homo sapiens
  Heavy chain CDR3 for antibody 3659 (IGHV1-46)
AREKYQGSGSYPFEY

SEQ ID NO: 7319 - protein, 9 aa, Homo sapiens
  Light chain CDR3 for antibody 3660 (IGKV1D-17)
LQHNSYPYT

SEQ ID NO: 7320 - protein, 10 aa, Homo sapiens
  Heavy chain CDR3 for antibody 3660 (IGHV3-33)
ARESTDGIDF

SEQ ID NO: 7321 - protein, 9 aa, Homo sapiens
  Light chain CDR3 for antibody 3661 (IGKV1-9)
QQFNSHPFT

SEQ ID NO: 7322 - protein, 17 aa, Homo sapiens
  Heavy chain CDR3 for antibody 3661 (IGHV3-30)
AREITRVRGDNSYALDV

SEQ ID NO: 7323 - protein, 9 aa, Homo sapiens
  Light chain CDR3 for antibody 3662 (IGKV1-9)
QQLNSYPLT

SEQ ID NO: 7324 - protein, 15 aa, Homo sapiens
  Heavy chain CDR3 for antibody 3662 (IGHV1-46)
AREGLAGYYPNWFDH

SEQ ID NO: 7325 - protein, 9 aa, Homo sapiens
  Light chain CDR3 for antibody 3663 (IGKV1-9)
QQLNSYPYT

SEQ ID NO: 7326 - protein, 15 aa, Homo sapiens
  Heavy chain CDR3 for antibody 3663 (IGHV1-46)
GIEKYYGAGSYPFDY

SEQ ID NO: 7327 - protein, 9 aa, Homo sapiens
  Light chain CDR3 for antibody 3664 (IGKV1-9)
QQLNGYPYT

SEQ ID NO: 7328 - protein, 15 aa, Homo sapiens
  Heavy chain CDR3 for antibody 3664 (IGHV1-46)
AREKYYGSGSYPLAY

SEQ ID NO: 7329 - protein, 9 aa, Homo sapiens
  Light chain CDR3 for antibody 3665 (IGKV1D-17)
LQHNSYPYT

SEQ ID NO: 7330 - protein, 10 aa, Homo sapiens
  Heavy chain CDR3 for antibody 3665 (IGHV3-33)
AREAAAGMDF

SEQ ID NO: 7331 - protein, 9 aa, Homo sapiens
  Light chain CDR3 for antibody 3666 (IGKV1-9)
QQFNSYPFT

SEQ ID NO: 7332 - protein, 17 aa, Homo sapiens
  Heavy chain CDR3 for antibody 3666 (IGHV3-33)
GRESTMVRGENYYGMDV

SEQ ID NO: 7333 - protein, 9 aa, Homo sapiens
  Light chain CDR3 for antibody 3667 (IGKV1-9)
QQLNSYPFT

SEQ ID NO: 7334 - protein, 17 aa, Homo sapiens
  Heavy chain CDR3 for antibody 3667 (IGHV3-33)
AREISMGRGDNYYGLDV

SEQ ID NO: 7335 - protein, 9 aa, Homo sapiens
  Light chain CDR3 for antibody 3668 (IGKV1-9)
QQLNSYPFT

SEQ ID NO: 7336 - protein, 10 aa, Homo sapiens
  Heavy chain CDR3 for antibody 3668 (IGHV3-33)
ARDSSYGMDV

SEQ ID NO: 7337 - protein, 9 aa, Homo sapiens
  Light chain CDR3 for antibody 3669 (IGKV1D-17)
LQHNSYPYT

SEQ ID NO: 7338 - protein, 10 aa, Homo sapiens
  Heavy chain CDR3 for antibody 3669 (IGHV3-33)
ASDSTDGMDL

SEQ ID NO: 7339 - protein, 9 aa, Homo sapiens
  Light chain CDR3 for antibody 3670 (IGKV1D-17)
LQHNSYPYT

SEQ ID NO: 7340 - protein, 17 aa, Homo sapiens
  Heavy chain CDR3 for antibody 3670 (IGHV3-33)
AREITMVRGDNSYAMDA

SEQ ID NO: 7341 - protein, 9 aa, Homo sapiens
  Light chain CDR3 for antibody 3671 (IGKV1D-17)
LQHNSYPYT

SEQ ID NO: 7342 - protein, 10 aa, Homo sapiens
  Heavy chain CDR3 for antibody 3671 (IGHV3-33)
AREAPAGMEA

SEQ ID NO: 7343 - protein, 9 aa, Homo sapiens
  Light chain CDR3 for antibody 3672 (IGKV1D-17)
LQHNSYPYT

SEQ ID NO: 7344 - protein, 10 aa, Homo sapiens
  Heavy chain CDR3 for antibody 3672 (IGHV3-33)
TRESGECFDY

SEQ ID NO: 7345 - protein, 9 aa, Homo sapiens
  Light chain CDR3 for antibody 3673 (IGKV1-9)
HQLISYPYT

SEQ ID NO: 7346 - protein, 15 aa, Homo sapiens
  Heavy chain CDR3 for antibody 3673 (IGHV1-46)
AREKYYGSESYPIDY

SEQ ID NO: 7347 - protein, 9 aa, Homo sapiens
  Light chain CDR3 for antibody 3674 (IGKV1D-17)
LQHNSYPYT

SEQ ID NO: 7348 - protein, 10 aa, Homo sapiens
  Heavy chain CDR3 for antibody 3674 (IGHV3-30)
TRESTDGINS

SEQ ID NO: 7349 - protein, 9 aa, Homo sapiens
  Light chain CDR3 for antibody 3675 (IGKV1-9)
QQLNSYPYT

SEQ ID NO: 7350 - protein, 15 aa, Homo sapiens
  Heavy chain CDR3 for antibody 3675 (IGHV1-46)
VREKYYGSGSYALDY

SEQ ID NO: 7351 - protein, 9 aa, Homo sapiens
  Light chain CDR3 for antibody 3676 (IGKV1-9)
QQLNSYPYT

SEQ ID NO: 7352 - protein, 15 aa, Homo sapiens
  Heavy chain CDR3 for antibody 3676 (IGHV1-46)
AREKYYGSGSSPFEY

SEQ ID NO: 7353 - protein, 9 aa, Homo sapiens
  Light chain CDR3 for antibody 3677 (IGKV1-9)
QQLNGYPYT

SEQ ID NO: 7354 - protein, 15 aa, Homo sapiens
  Heavy chain CDR3 for antibody 3677 (IGHV1-46)
AREKYYGAKSYPFDC

SEQ ID NO: 7355 - protein, 9 aa, Homo sapiens
  Light chain CDR3 for antibody 3678 (IGKV1-9)
QQLNSHPFT

SEQ ID NO: 7356 - protein, 17 aa, Homo sapiens
  Heavy chain CDR3 for antibody 3678 (IGHV3-33)
EREVTIVRGENYYGLDV

SEQ ID NO: 7357 - protein, 9 aa, Homo sapiens
  Light chain CDR3 for antibody 3679 (IGKV1-9)
QHLNSHPFT

SEQ ID NO: 7358 - protein, 17 aa, Homo sapiens
  Heavy chain CDR3 for antibody 3679 (IGHV3-33)
AREIARVRGDSYYGMDV

SEQ ID NO: 7359 - protein, 9 aa, Homo sapiens
  Light chain CDR3 for antibody 3680 (IGKV1D-17)
LQHNSYPYT

SEQ ID NO: 7360 - protein, 10 aa, Homo sapiens
  Heavy chain CDR3 for antibody 3680 (IGHV3-33)
ARASTDGIEA

SEQ ID NO: 7361 - protein, 9 aa, Homo sapiens
  Light chain CDR3 for antibody 3681 (IGKV1-9)
QQLNSYPFT

SEQ ID NO: 7362 - protein, 17 aa, Homo sapiens
  Heavy chain CDR3 for antibody 3681 (IGHV3-33)
AREITVVRGDNYSGMDA

SEQ ID NO: 7363 - protein, 9 aa, Homo sapiens
  Light chain CDR3 for antibody 3682 (IGKV1-9)
QQLNSYPFT

SEQ ID NO: 7364 - protein, 17 aa, Homo sapiens
  Heavy chain CDR3 for antibody 3682 (IGHV3-33)
EREITVGRGDNYYGMDV

SEQ ID NO: 7365 - protein, 9 aa, Homo sapiens
  Light chain CDR3 for antibody 3683 (IGKV1-9)
QQLNSYPFT

SEQ ID NO: 7366 - protein, 17 aa, Homo sapiens
  Heavy chain CDR3 for antibody 3683 (IGHV3-38)
AREITMIPGDNYYAMDV

SEQ ID NO: 7367 - protein, 9 aa, Homo sapiens
  Light chain CDR3 for antibody 3684 (IGKV1-9)
QQLNSYPFT

SEQ ID NO: 7368 - protein, 17 aa, Homo sapiens
  Heavy chain CDR3 for antibody 3684 (IGHV3-33)
AREITMVRGDNYSGIDV

SEQ ID NO: 7369 - protein, 9 aa, Homo sapiens
  Light chain CDR3 for antibody 3685 (IGKV1-8)
QQYCSYPFT

SEQ ID NO: 7370 - protein, 18 aa, Homo sapiens
  Heavy chain CDR3 for antibody 3685 (IGHV3-11)
ARDRGIAAAGTYYYGMAV

SEQ ID NO: 7371 - protein, 9 aa, Homo sapiens
  Light chain CDR3 for antibody 3686 (IGKV1-9)
QQLNSHPFT

SEQ ID NO: 7372 - protein, 17 aa, Homo sapiens
  Heavy chain CDR3 for antibody 3686 (IGHV3-33)
AREVTKVQGYNYYGLDV

SEQ ID NO: 7373 - protein, 9 aa, Homo sapiens
  Light chain CDR3 for antibody 3687 (IGKV1-9)
QQFNSHPFT

SEQ ID NO: 7374 - protein, 17 aa, Homo sapiens
  Heavy chain CDR3 for antibody 3687 (IGHV3-33)
AREITMVRGDNYYGMAG

SEQ ID NO: 7375 - protein, 9 aa, Homo sapiens
  Light chain CDR3 for antibody 3688 (IGKV1-9)
QHLNSHPFT

SEQ ID NO: 7376 - protein, 17 aa, Homo sapiens
  Heavy chain CDR3 for antibody 3688 (IGHV3-33)
ARGITMVRGDNYYGMDV

SEQ ID NO: 7377 - protein, 9 aa, Homo sapiens
  Light chain CDR3 for antibody 3689 (IGKV1D-17)
LQHNSYPYT

SEQ ID NO: 7378 - protein, 10 aa, Homo sapiens
  Heavy chain CDR3 for antibody 3689 (IGHV3-33)
SRASTDAMDA

SEQ ID NO: 7379 - protein, 9 aa, Homo sapiens
  Light chain CDR3 for antibody 3690 (IGKV1-9)
QQLNSHPFT

SEQ ID NO: 7380 - protein, 14 aa, Homo sapiens
  Heavy chain CDR3 for antibody 3690 (IGHV3-33)
AKDRAVAGTYYFDY

SEQ ID NO: 7381 - protein, 9 aa, Homo sapiens
  Light chain CDR3 for antibody 3691 (IGKV1D-17)
LQHNSYPYT

SEQ ID NO: 7382 - protein, 17 aa, Homo sapiens
  Heavy chain CDR3 for antibody 3691 (IGHV3-33)
VREITRVRGDNYYGLAV

SEQ ID NO: 7383 - protein, 9 aa, Homo sapiens
  Light chain CDR3 for antibody 3692 (IGKV1D-17)
LQHNSYPYT

SEQ ID NO: 7384 - protein, 9 aa, Homo sapiens
  Heavy chain CDR3 for antibody 3692 (IGHV3/OR16-1)
GREGAGIDY

SEQ ID NO: 7385 - protein, 9 aa, Homo sapiens
  Light chain CDR3 for antibody 3693 (IGKV1-9)
QQLNSHPFT

SEQ ID NO: 7386 - protein, 17 aa, Homo sapiens
  Heavy chain CDR3 for antibody 3693 (IGHV3-33)
ARESTRVRGDNYDGMDV

SEQ ID NO: 7387 - protein, 9 aa, Homo sapiens
  Light chain CDR3 for antibody 3694 (IGKV1-9)
QQFNSHPFT

SEQ ID NO: 7388 - protein, 17 aa, Homo sapiens
  Heavy chain CDR3 for antibody 3694 (IGHV3-66)
AREITMVRGENSYGMDV

SEQ ID NO: 7389 - protein, 9 aa, Homo sapiens
  Light chain CDR3 for antibody 3695 (IGKV1-9)
QQLISYPYT

SEQ ID NO: 7390 - protein, 10 aa, Homo sapiens
  Heavy chain CDR3 for antibody 3695 (IGHV1-46)
AREYTDGIAV

SEQ ID NO: 7391 - protein, 9 aa, Homo sapiens
  Light chain CDR3 for antibody 3696 (IGKV1D-17)
LQHNSYPYT

SEQ ID NO: 7392 - protein, 10 aa, Homo sapiens
  Heavy chain CDR3 for antibody 3696 (IGHV3-33)
SRESADGMDA

SEQ ID NO: 7393 - protein, 9 aa, Homo sapiens
  Light chain CDR3 for antibody 3697 (IGKV1D-17)
LQHNSYPYT

SEQ ID NO: 7394 - protein, 15 aa, Homo sapiens
  Heavy chain CDR3 for antibody 3697 (IGHV1-46)
AREKYHGSGSYAIDY

SEQ ID NO: 7395 - protein, 9 aa, Homo sapiens
  Light chain CDR3 for antibody 3698 (IGKV1-9)
QQLNSYPFT

SEQ ID NO: 7396 - protein, 17 aa, Homo sapiens
  Heavy chain CDR3 for antibody 3698 (IGHV3-30)
ERAINMVRGEKYYGMDV

SEQ ID NO: 7397 - protein, 9 aa, Homo sapiens
  Light chain CDR3 for antibody 3699 (IGKV1-9)
QHLNSHPFT

SEQ ID NO: 7398 - protein, 17 aa, Homo sapiens
  Heavy chain CDR3 for antibody 3699 (IGHV3-33)
AREITMVRGDNSYGLDA

SEQ ID NO: 7399 - protein, 9 aa, Homo sapiens
  Light chain CDR3 for antibody 3700 (IGKV1-9)
QQLNSYPFT

SEQ ID NO: 7400 - protein, 17 aa, Homo sapiens
  Heavy chain CDR3 for antibody 3700 (IGHV3-33)
ARESALVRGDSYYGMDV

SEQ ID NO: 7401 - protein, 9 aa, Homo sapiens
  Light chain CDR3 for antibody 3701 (IGKV1-9)
QQLNSYPFT

SEQ ID NO: 7402 - protein, 17 aa, Homo sapiens
  Heavy chain CDR3 for antibody 3701 (IGHV3-30)
ARESTIARGDNYYAMDV

SEQ ID NO: 7403 - protein, 9 aa, Homo sapiens
  Light chain CDR3 for antibody 3702 (IGKV1-9)
QHLNSHPFT

SEQ ID NO: 7404 - protein, 17 aa, Homo sapiens
  Heavy chain CDR3 for antibody 3702 (IGHV3-23)
AREITMVRGANYYGMDV

SEQ ID NO: 7405 - protein, 9 aa, Homo sapiens
  Light chain CDR3 for antibody 3703 (IGKV1-9)
QQLISYPYT

SEQ ID NO: 7406 - protein, 15 aa, Homo sapiens
  Heavy chain CDR3 for antibody 3703 (IGHV1-46)
AREKYYGSGSHPFYS

SEQ ID NO: 7407 - protein, 9 aa, Homo sapiens
  Light chain CDR3 for antibody 3704 (IGKV1-9)
QQLNSYPFT

SEQ ID NO: 7408 - protein, 17 aa, Homo sapiens
  Heavy chain CDR3 for antibody 3704 (IGHV3-33)
EREITIVRGDNCYGMDV

SEQ ID NO: 7409 - protein, 9 aa, Homo sapiens
  Light chain CDR3 for antibody 3705 (IGKV1-9)
QQFNSYPFT

SEQ ID NO: 7410 - protein, 17 aa, Homo sapiens
  Heavy chain CDR3 for antibody 3705 (IGHV3-33)
AREITLVRGDNYYGMEA

SEQ ID NO: 7411 - protein, 9 aa, Homo sapiens
  Light chain CDR3 for antibody 3706 (IGKV1-12)
QQANSFPRT

SEQ ID NO: 7412 - protein, 15 aa, Homo sapiens
  Heavy chain CDR3 for antibody 3706 (IGHV3-33)
ARDYSTYYYYYGMDV

SEQ ID NO: 7413 - protein, 9 aa, Homo sapiens
  Light chain CDR3 for antibody 3707 (IGKV1-9)
QQLNSYPFT

SEQ ID NO: 7414 - protein, 17 aa, Homo sapiens
  Heavy chain CDR3 for antibody 3707 (IGHV3-33)
AREVTMVRGDKYDGLDD

SEQ ID NO: 7415 - protein, 9 aa, Homo sapiens
  Light chain CDR3 for antibody 3708 (IGKV1-9)
QQLISYPYT

SEQ ID NO: 7416 - protein, 10 aa, Homo sapiens
  Heavy chain CDR3 for antibody 3708 (IGHV1-46)
ARETVAGFDY

SEQ ID NO: 7417 - protein, 9 aa, Homo sapiens
  Light chain CDR3 for antibody 3709 (IGKV1-9)
QQLNSYPFT

SEQ ID NO: 7418 - protein, 17 aa, Homo sapiens
  Heavy chain CDR3 for antibody 3709 (IGHV3-33)
ARESAMARGDNYYGMDV

SEQ ID NO: 7419 - protein, 9 aa, Homo sapiens
  Light chain CDR3 for antibody 3710 (IGKV3D-20)
QQYGSSPWT

SEQ ID NO: 7420 - protein, 19 aa, Homo sapiens
  Heavy chain CDR3 for antibody 3710 (IGHV1-18)
ASDHGYWSSPSCYRAWFAP

SEQ ID NO: 7421 - protein, 9 aa, Homo sapiens
  Light chain CDR3 for antibody 3711 (IGKV1D-17)
LQHDSYPYT

SEQ ID NO: 7422 - protein, 8 aa, Homo sapiens
  Heavy chain CDR3 for antibody 3711 (IGHV4-59)
ARYEGMDV

SEQ ID NO: 7423 - protein, 9 aa, Homo sapiens
  Light chain CDR3 for antibody 3712 (IGKV1D-17)
LQHNSYPYT

SEQ ID NO: 7424 - protein, 10 aa, Homo sapiens
  Heavy chain CDR3 for antibody 3712 (IGHV3-33)
AREATYGMDS

SEQ ID NO: 7425 - protein, 9 aa, Homo sapiens
  Light chain CDR3 for antibody 3713 (IGKV1-9)
QQLNSYPFT

SEQ ID NO: 7426 - protein, 17 aa, Homo sapiens
  Heavy chain CDR3 for antibody 3713 (IGHV3-33)
AREITVGRGENYYGMDV

SEQ ID NO: 7427 - protein, 9 aa, Homo sapiens
  Light chain CDR3 for antibody 3714 (IGKV1-9)
QQLNSHPFT

SEQ ID NO: 7428 - protein, 17 aa, Homo sapiens
  Heavy chain CDR3 for antibody 3714 (IGHV3-11)
SRAITMVRGSNYYGMDV

SEQ ID NO: 7429 - protein, 9 aa, Homo sapiens
  Light chain CDR3 for antibody 3715 (IGKV1-9)
QQLNSYPFT

SEQ ID NO: 7430 - protein, 17 aa, Homo sapiens
  Heavy chain CDR3 for antibody 3715 (IGHV3-11)
ARAITMGRGENYYGLDV

SEQ ID NO: 7431 - protein, 9 aa, Homo sapiens
  Light chain CDR3 for antibody 3716 (IGKV1-13)
QQLISYPYT

SEQ ID NO: 7432 - protein, 15 aa, Homo sapiens
  Heavy chain CDR3 for antibody 3716 (IGHV1-46)
AREKYYGACSDPFDS

SEQ ID NO: 7433 - protein, 9 aa, Homo sapiens
  Light chain CDR3 for antibody 3717 (IGKV1-9)
QQLNSFPFT

SEQ ID NO: 7434 - protein, 17 aa, Homo sapiens
  Heavy chain CDR3 for antibody 3717 (IGHV3-33)
ARAITMVRGDNSYGMDV

SEQ ID NO: 7435 - protein, 9 aa, Homo sapiens
  Light chain CDR3 for antibody 3718 (IGKV1-9)
QQLNSYPFT

SEQ ID NO: 7436 - protein, 17 aa, Homo sapiens
  Heavy chain CDR3 for antibody 3718 (IGHV3-33)
AREITMDRGDNYYGIDD

SEQ ID NO: 7437 - protein, 9 aa, Homo sapiens
  Light chain CDR3 for antibody 3719 (IGKV1-9)
QQLNSYPFT

SEQ ID NO: 7438 - protein, 17 aa, Homo sapiens
  Heavy chain CDR3 for antibody 3719 (IGHV3-33)
EREITLVRGDNYDGMDD

SEQ ID NO: 7439 - protein, 9 aa, Homo sapiens
  Light chain CDR3 for antibody 3720 (IGKV1-9)
QQLISYPYT

SEQ ID NO: 7440 - protein, 15 aa, Homo sapiens
  Heavy chain CDR3 for antibody 3720 (IGHV1-46)
AREKYYGSGTSPFAS

SEQ ID NO: 7441 - protein, 9 aa, Homo sapiens
  Light chain CDR3 for antibody 3721 (IGKV1-9)
QQLNSYPYT

SEQ ID NO: 7442 - protein, 17 aa, Homo sapiens
  Heavy chain CDR3 for antibody 3721 (IGHV3-33)
AREITMVRGDDYDGMDA

SEQ ID NO: 7443 - protein, 9 aa, Homo sapiens
  Light chain CDR3 for antibody 3722 (IGKV1-9)
QQLNSHPFT

SEQ ID NO: 7444 - protein, 17 aa, Homo sapiens
  Heavy chain CDR3 for antibody 3722 (IGHV3-7)
EREITMVRRYNYYGIDV

SEQ ID NO: 7445 - protein, 9 aa, Homo sapiens
  Light chain CDR3 for antibody 3723 (IGKV1-9)
QQLNSYPFT

SEQ ID NO: 7446 - protein, 10 aa, Homo sapiens
  Heavy chain CDR3 for antibody 3723 (IGHV3-33)
AGESTYGMDA

SEQ ID NO: 7447 - protein, 9 aa, Homo sapiens
  Light chain CDR3 for antibody 3724 (IGKV1-9)
QQFNSHPFT

SEQ ID NO: 7448 - protein, 13 aa, Homo sapiens
  Heavy chain CDR3 for antibody 3724 (IGHV1-24)
ATTYSGYAYYFDY

SEQ ID NO: 7449 - protein, 9 aa, Homo sapiens
  Light chain CDR3 for antibody 3725 (IGKV1-9)
QQLNSYPYT

SEQ ID NO: 7450 - protein, 17 aa, Homo sapiens
  Heavy chain CDR3 for antibody 3725 (IGHV3-30)
ERESTMGRGDNYYGMDV

SEQ ID NO: 7451 - protein, 9 aa, Homo sapiens
  Light chain CDR3 for antibody 3726 (IGKV1-9)
QQLNSYPFT

SEQ ID NO: 7452 - protein, 17 aa, Homo sapiens
  Heavy chain CDR3 for antibody 3726 (IGHV3-33)
AREITLVQGDNYYGIDY

SEQ ID NO: 7453 - protein, 9 aa, Homo sapiens
  Light chain CDR3 for antibody 3727 (IGKV1-9)
QQLNSYPFT

SEQ ID NO: 7454 - protein, 15 aa, Homo sapiens
  Heavy chain CDR3 for antibody 3727 (IGHV1-46)
AREKSYGSGSYAFDS

SEQ ID NO: 7455 - protein, 9 aa, Homo sapiens
  Light chain CDR3 for antibody 3728 (IGKV1-9)
QQLNSYPYT

SEQ ID NO: 7456 - protein, 15 aa, Homo sapiens
  Heavy chain CDR3 for antibody 3728 (IGHV1-46)
AREKYSGSGRSPFDY

SEQ ID NO: 7457 - protein, 9 aa, Homo sapiens
  Light chain CDR3 for antibody 3729 (IGKV1-9)
QQLNSHPFT

SEQ ID NO: 7458 - protein, 10 aa, Homo sapiens
  Heavy chain CDR3 for antibody 3729 (IGHV3-33)
AREATYGMDV

SEQ ID NO: 7459 - protein, 9 aa, Homo sapiens
  Light chain CDR3 for antibody 3730 (IGKV1-9)
QQLNSHPFT

SEQ ID NO: 7460 - protein, 10 aa, Homo sapiens
  Heavy chain CDR3 for antibody 3730 (IGHV3-33)
AIESTDGMAV

SEQ ID NO: 7461 - protein, 9 aa, Homo sapiens
  Light chain CDR3 for antibody 3731 (IGKV1-9)
QQLNSYPFT

SEQ ID NO: 7462 - protein, 17 aa, Homo sapiens
  Heavy chain CDR3 for antibody 3731 (IGHV3-30)
ARESTKVRGANNYGMDV

SEQ ID NO: 7463 - protein, 9 aa, Homo sapiens
  Light chain CDR3 for antibody 3732 (IGKV1D-17)
LQHNSYPYT

SEQ ID NO: 7464 - protein, 10 aa, Homo sapiens
  Heavy chain CDR3 for antibody 3732 (IGHV3-33)
TREATDGMDD

SEQ ID NO: 7465 - protein, 9 aa, Homo sapiens
  Light chain CDR3 for antibody 3733 (IGKV1-9)
QQLNSYPYT

SEQ ID NO: 7466 - protein, 15 aa, Homo sapiens
  Heavy chain CDR3 for antibody 3733 (IGHV1-46)
AREKSYGTGNYPFDD

SEQ ID NO: 7467 - protein, 9 aa, Homo sapiens
  Light chain CDR3 for antibody 3734 (IGKV1-9)
QQLISYPYT

SEQ ID NO: 7468 - protein, 15 aa, Homo sapiens
  Heavy chain CDR3 for antibody 3734 (IGHV1-46)
ARAKYYGSGCYPFAS

SEQ ID NO: 7469 - protein, 9 aa, Homo sapiens
  Light chain CDR3 for antibody 3735 (IGKV1-6)
LQDYNYPWT

SEQ ID NO: 7470 - protein, 10 aa, Homo sapiens
  Heavy chain CDR3 for antibody 3735 (IGHV3-33)
AREAVAGFDY

SEQ ID NO: 7471 - protein, 9 aa, Homo sapiens
  Light chain CDR3 for antibody 3736 (IGKV1-9)
QQLNSYPFT

SEQ ID NO: 7472 - protein, 17 aa, Homo sapiens
  Heavy chain CDR3 for antibody 3736 (IGHV3-33)
AREINMVRGDNYYGIDF

SEQ ID NO: 7473 - protein, 9 aa, Homo sapiens
  Light chain CDR3 for antibody 3737 (IGKV1-9)
QQLNSHPFT

SEQ ID NO: 7474 - protein, 10 aa, Homo sapiens
  Heavy chain CDR3 for antibody 3737 (IGHV3-33)
ARDATDGMDV

SEQ ID NO: 7475 - protein, 9 aa, Homo sapiens
  Light chain CDR3 for antibody 3738 (IGKV1-9)
QQFNSYPFT

SEQ ID NO: 7476 - protein, 17 aa, Homo sapiens
  Heavy chain CDR3 for antibody 3738 (IGHV3-33)
GREIAMVRGDNYYGMDV

SEQ ID NO: 7477 - protein, 9 aa, Homo sapiens
  Light chain CDR3 for antibody 3739 (IGKV1-9)
QQLNGFPYT

SEQ ID NO: 7478 - protein, 15 aa, Homo sapiens
  Heavy chain CDR3 for antibody 3739 (IGHV1-46)
AREKYHGSGSYPFDY

SEQ ID NO: 7479 - protein, 9 aa, Homo sapiens
  Light chain CDR3 for antibody 3740 (IGKV6-21)
HQSSSLPYT

SEQ ID NO: 7480 - protein, 13 aa, Homo sapiens
  Heavy chain CDR3 for antibody 3740 (IGHV1-18)
AREGGSYIVSFDY

SEQ ID NO: 7481 - protein, 9 aa, Homo sapiens
  Light chain CDR3 for antibody 3741 (IGKV1-9)
QQLNSYPLT

SEQ ID NO: 7482 - protein, 15 aa, Homo sapiens
  Heavy chain CDR3 for antibody 3741 (IGHV1-46)
AREGLTGYYPNWFDP

SEQ ID NO: 7483 - protein, 9 aa, Homo sapiens
  Light chain CDR3 for antibody 3742 (IGKV1-9)
QQLNSYPYT

SEQ ID NO: 7484 - protein, 13 aa, Homo sapiens
  Heavy chain CDR3 for antibody 3742 (IGHV3-33)
ARDYCSGDCYPDP

SEQ ID NO: 7485 - protein, 9 aa, Homo sapiens
  Light chain CDR3 for antibody 3743 (IGKV1-9)
QQLNSYPYT

SEQ ID NO: 7486 - protein, 17 aa, Homo sapiens
  Heavy chain CDR3 for antibody 3743 (IGHV3-33)
AREITMLRGDNYYGLDV

SEQ ID NO: 7487 - protein, 9 aa, Homo sapiens
  Light chain CDR3 for antibody 3744 (IGKV1-9)
QQLDSHPFT

SEQ ID NO: 7488 - protein, 17 aa, Homo sapiens
  Heavy chain CDR3 for antibody 3744 (IGHV3-33)
AREITMVRGDNYYGLDV

SEQ ID NO: 7489 - protein, 9 aa, Homo sapiens
  Light chain CDR3 for antibody 3745 (IGKV6-21)
HQSSSLPYT

SEQ ID NO: 7490 - protein, 14 aa, Homo sapiens
  Heavy chain CDR3 for antibody 3745 (IGHV1-18)
AREGYSGYLVYFDY

SEQ ID NO: 7491 - protein, 9 aa, Homo sapiens
  Light chain CDR3 for antibody 3746 (IGKV1-9)
HQLIGYPYT

SEQ ID NO: 7492 - protein, 15 aa, Homo sapiens
  Heavy chain CDR3 for antibody 3746 (IGHV1-46)
AREKYSGSGSYPFDY

SEQ ID NO: 7493 - protein, 9 aa, Homo sapiens
  Light chain CDR3 for antibody 3747 (IGKV1-9)
QQFNSHPFT

SEQ ID NO: 7494 - protein, 17 aa, Homo sapiens
  Heavy chain CDR3 for antibody 3747 (IGHV3-33)
AREITLVRGDNYYGMDV

SEQ ID NO: 7495 - protein, 9 aa, Homo sapiens
  Light chain CDR3 for antibody 3748 (IGKV1-9)
QQFNSHPFT

SEQ ID NO: 7496 - protein, 15 aa, Homo sapiens
  Heavy chain CDR3 for antibody 3748 (IGHV1-46)
AREKYYGSGSYPFDY

SEQ ID NO: 7497 - protein, 9 aa, Homo sapiens
  Light chain CDR3 for antibody 3749 (IGKV1-9)
QQLNSYPYT

SEQ ID NO: 7498 - protein, 16 aa, Homo sapiens
  Heavy chain CDR3 for antibody 3749 (IGHV1-18)
AREGDTMVRGVIAFDY

SEQ ID NO: 7499 - protein, 9 aa, Homo sapiens
  Light chain CDR3 for antibody 3750 (IGKV1-9)
QQLNSYPYT

SEQ ID NO: 7500 - protein, 13 aa, Homo sapiens
  Heavy chain CDR3 for antibody 3750 (IGHV1-46)
AREGGSYYVSFDY

SEQ ID NO: 7501 - protein, 9 aa, Homo sapiens
  Light chain CDR3 for antibody 3751 (IGKV1-9)
QQFNSYPFT

SEQ ID NO: 7502 - protein, 17 aa, Homo sapiens
  Heavy chain CDR3 for antibody 3751 (IGHV3-11)
AREITMVRGDNYYGFDY

SEQ ID NO: 7503 - protein, 9 aa, Homo sapiens
  Light chain CDR3 for antibody 3752 (IGKV1-9)
QQLNGYPYT

SEQ ID NO: 7504 - protein, 15 aa, Homo sapiens
  Heavy chain CDR3 for antibody 3752 (IGHV1-46)
AREKSYGSGSYPFDS

SEQ ID NO: 7505 - protein, 9 aa, Homo sapiens
  Light chain CDR3 for antibody 3753 (IGKV1D-17)
LQHNSYPYT

SEQ ID NO: 7506 - protein, 15 aa, Homo sapiens
  Heavy chain CDR3 for antibody 3753 (IGHV1-46)
AREKYYGSGSYPFDY

SEQ ID NO: 7507 - protein, 9 aa, Homo sapiens
  Light chain CDR3 for antibody 3754 (IGKV1D-17)
LQHNSYPYT

SEQ ID NO: 7508 - protein, 10 aa, Homo sapiens
  Heavy chain CDR3 for antibody 3754 (IGHV3-33)
AREGTDGFDP

SEQ ID NO: 7509 - protein, 9 aa, Homo sapiens
  Light chain CDR3 for antibody 3755 (IGKV1-9)
QQLNGFPYT

SEQ ID NO: 7510 - protein, 17 aa, Homo sapiens
  Heavy chain CDR3 for antibody 3755 (IGHV3-33)
AREITMVRGDNYYGMDV

SEQ ID NO: 7511 - protein, 9 aa, Homo sapiens
  Light chain CDR3 for antibody 3756 (IGKV1-9)
QQLNSHPFT

SEQ ID NO: 7512 - protein, 17 aa, Homo sapiens
  Heavy chain CDR3 for antibody 3756 (IGHV3-33)
VREISLVRGDNYYGLDV

SEQ ID NO: 7513 - protein, 9 aa, Homo sapiens
  Light chain CDR3 for antibody 3757 (IGKV1D-17)
LQHNSYPYT

SEQ ID NO: 7514 - protein, 10 aa, Homo sapiens
  Heavy chain CDR3 for antibody 3757 (IGHV3-33)
ARESGEGFDP

SEQ ID NO: 7515 - protein, 8 aa, Homo sapiens
  Light chain CDR3 for antibody 3758 (IGKV3D-20)
QQYGSSWT

SEQ ID NO: 7516 - protein, 11 aa, Homo sapiens
  Heavy chain CDR3 for antibody 3758 (IGHV3-33)
ARDGYSSGWDY

SEQ ID NO: 7517 - protein, 9 aa, Homo sapiens
  Light chain CDR3 for antibody 3759 (IGKV1-9)
QQLNSYPYT

SEQ ID NO: 7518 - protein, 11 aa, Homo sapiens
  Heavy chain CDR3 for antibody 3759 (IGHV3-33)
AREWQWLAPDY

SEQ ID NO: 7519 - protein, 9 aa, Homo sapiens
  Light chain CDR3 for antibody 3760 (IGKV1-17)
LQHNTYPRT

SEQ ID NO: 7520 - protein, 14 aa, Homo sapiens
  Heavy chain CDR3 for antibody 3760 (IGHV4-59)
ARDYGSGSYYTFDY

SEQ ID NO: 7521 - protein, 9 aa, Homo sapiens
  Light chain CDR3 for antibody 3761 (IGKV6-21)
HQSSSLPYT

SEQ ID NO: 7522 - protein, 17 aa, Homo sapiens
  Heavy chain CDR3 for antibody 3761 (IGHV3-33)
AREITMVRGDNYYGMDV

SEQ ID NO: 7523 - protein, 9 aa, Homo sapiens
  Light chain CDR3 for antibody 3762 (IGKV1-16)
QQYNSYPYT

SEQ ID NO: 7524 - protein, 15 aa, Homo sapiens
  Heavy chain CDR3 for antibody 3762 (IGHV1-18)
AATVTTSYYYYGMDV

SEQ ID NO: 7525 - protein, 9 aa, Homo sapiens
  Light chain CDR3 for antibody 3763 (IGKV1-6)
LQDYNYPWT

SEQ ID NO: 7526 - protein, 15 aa, Homo sapiens
  Heavy chain CDR3 for antibody 3763 (IGHV1-46)
AREKYYGSGSYPFDY

SEQ ID NO: 7527 - protein, 9 aa, Homo sapiens
  Light chain CDR3 for antibody 3764 (IGKV1-6)
LQDYNYPRT

SEQ ID NO: 7528 - protein, 13 aa, Homo sapiens
  Heavy chain CDR3 for antibody 3764 (IGHV1-18)
AREGGNYYVSFDH

SEQ ID NO: 7529 - protein, 9 aa, Homo sapiens
  Light chain CDR3 for antibody 3765 (IGKV1-9)
QQLNGYPYT

SEQ ID NO: 7530 - protein, 10 aa, Homo sapiens
  Heavy chain CDR3 for antibody 3765 (IGHV3-33)
ARESVAGFDY

SEQ ID NO: 7531 - protein, 9 aa, Homo sapiens
  Light chain CDR3 for antibody 3766 (IGKV1D-13)
QQFNNYPRT

SEQ ID NO: 7532 - protein, 16 aa, Homo sapiens
  Heavy chain CDR3 for antibody 3766 (IGHV3-33)
ARFGYSYGYDYCGMDV

SEQ ID NO: 7533 - protein, 9 aa, Homo sapiens
  Light chain CDR3 for antibody 3767 (IGKV1-17)
LQHNSYPFT

SEQ ID NO: 7534 - protein, 13 aa, Homo sapiens
  Heavy chain CDR3 for antibody 3767 (IGHV1-46)
ARGTGTTGGSFDY

SEQ ID NO: 7535 - protein, 9 aa, Homo sapiens
  Light chain CDR3 for antibody 3768 (IGKV1-12)
QQANSFPWT

SEQ ID NO: 7536 - protein, 19 aa, Homo sapiens
  Heavy chain CDR3 for antibody 3768 (IGHV1-18)
ARDHGYCSSTSCYRAWFDP

SEQ ID NO: 7537 - protein, 9 aa, Homo sapiens
  Light chain CDR3 for antibody 3769 (IGKV6-21)
HQSSSLPYT

SEQ ID NO: 7538 - protein, 9 aa, Homo sapiens
  Heavy chain CDR3 for antibody 3769 (IGHV3-23)
AKDELGIDY

SEQ ID NO: 7539 - protein, 9 aa, Homo sapiens
  Light chain CDR3 for antibody 3770 (IGKV1-9)
HQLISYPYT

SEQ ID NO: 7540 - protein, 15 aa, Homo sapiens
  Heavy chain CDR3 for antibody 3770 (IGHV1-46)
AREKYYGLGSYPFDC

SEQ ID NO: 7541 - protein, 9 aa, Homo sapiens
  Light chain CDR3 for antibody 3771 (IGKV1-9)
QHLNSYPFT

SEQ ID NO: 7542 - protein, 17 aa, Homo sapiens
  Heavy chain CDR3 for antibody 3771 (IGHV3-33)
ASEITLVRGDNYYGMDV

SEQ ID NO: 7543 - protein, 9 aa, Homo sapiens
  Light chain CDR3 for antibody 3772 (IGKV1-9)
QQLNGYPYT

SEQ ID NO: 7544 - protein, 15 aa, Homo sapiens
  Heavy chain CDR3 for antibody 3772 (IGHV1-46)
AREKYYGAGSYPFDY

SEQ ID NO: 7545 - protein, 9 aa, Homo sapiens
  Light chain CDR3 for antibody 3773 (IGKV1-9)
QQLNSYPLT

SEQ ID NO: 7546 - protein, 19 aa, Homo sapiens
  Heavy chain CDR3 for antibody 3773 (IGHV4-59)
AREVRDILTGYNYYYGMDV

SEQ ID NO: 7547 - protein, 9 aa, Homo sapiens
  Light chain CDR3 for antibody 3774 (IGKV1-9)
QQLNGYPYT

SEQ ID NO: 7548 - protein, 15 aa, Homo sapiens
  Heavy chain CDR3 for antibody 3774 (IGHV1-46)
AREKFSGSGSYPFDY

SEQ ID NO: 7549 - protein, 8 aa, Homo sapiens
  Light chain CDR3 for antibody 3775 (IGKV3-15)
QQYNNWWT

SEQ ID NO: 7550 - protein, 10 aa, Homo sapiens
  Heavy chain CDR3 for antibody 3775 (IGHV3-23)
AKDDWGYFDY

SEQ ID NO: 7551 - protein, 9 aa, Homo sapiens
  Light chain CDR3 for antibody 3776 (IGKV1-6)
LQDYNYPWT

SEQ ID NO: 7552 - protein, 13 aa, Homo sapiens
  Heavy chain CDR3 for antibody 3776 (IGHV1-18)
AREGGSFYVSFDY

SEQ ID NO: 7553 - protein, 10 aa, Homo sapiens
  Light chain CDR3 for antibody 3777 (IGKV1-9)
QQLNSYPPWT

SEQ ID NO: 7554 - protein, 17 aa, Homo sapiens
  Heavy chain CDR3 for antibody 3777 (IGHV3-33)
AREITMVRGDNYYGMDV

SEQ ID NO: 7555 - protein, 9 aa, Homo sapiens
  Light chain CDR3 for antibody 3778 (IGKV1D-16)
QQYNSYPRT

SEQ ID NO: 7556 - protein, 16 aa, Homo sapiens
  Heavy chain CDR3 for antibody 3778 (IGHV1-46)
ARDGNPENYYYYGMDV

SEQ ID NO: 7557 - protein, 9 aa, Homo sapiens
  Light chain CDR3 for antibody 3779 (IGKV1-9)
QRLNSYPYT

SEQ ID NO: 7558 - protein, 13 aa, Homo sapiens
  Heavy chain CDR3 for antibody 3779 (IGHV3-33)
ARDYCGGDCYTDP

SEQ ID NO: 7559 - protein, 9 aa, Homo sapiens
  Light chain CDR3 for antibody 3780 (IGKV6-21)
HQSSSLPYT

SEQ ID NO: 7560 - protein, 10 aa, Homo sapiens
  Heavy chain CDR3 for antibody 3780 (IGHV3-33)
ARESVAGFDY

SEQ ID NO: 7561 - protein, 9 aa, Homo sapiens
  Light chain CDR3 for antibody 3781 (IGKV6-21)
HQSSSLPYT

SEQ ID NO: 7562 - protein, 13 aa, Homo sapiens
  Heavy chain CDR3 for antibody 3781 (IGHV1-18)
AREGGSFYVSFDY

SEQ ID NO: 7563 - protein, 9 aa, Homo sapiens
  Light chain CDR3 for antibody 3782 (IGKV1-9)
QQLNSYPFT

SEQ ID NO: 7564 - protein, 17 aa, Homo sapiens
  Heavy chain CDR3 for antibody 3782 (IGHV3-33)
VREVTMVRGDNYYGIDV

SEQ ID NO: 7565 - protein, 9 aa, Homo sapiens
  Light chain CDR3 for antibody 3783 (IGKV1-6)
LQDYNYPWT

SEQ ID NO: 7566 - protein, 13 aa, Homo sapiens
  Heavy chain CDR3 for antibody 3783 (IGHV3-13)
ARGGWELFDAFDI

SEQ ID NO: 7567 - protein, 9 aa, Homo sapiens
  Light chain CDR3 for antibody 3784 (IGKV3D-20)
QQYGSSPYT

SEQ ID NO: 7568 - protein, 16 aa, Homo sapiens
  Heavy chain CDR3 for antibody 3784 (IGHV3-33)
ARIAAAGYYYYYGMDV

SEQ ID NO: 7569 - protein, 9 aa, Homo sapiens
  Light chain CDR3 for antibody 3785 (IGKV1-9)
QQLNGFPYT

SEQ ID NO: 7570 - protein, 10 aa, Homo sapiens
  Heavy chain CDR3 for antibody 3785 (IGHV3-33)
ARESTDGMDV

SEQ ID NO: 7571 - protein, 9 aa, Homo sapiens
  Light chain CDR3 for antibody 3786 (IGKV1-9)
QQLNSYPFT

SEQ ID NO: 7572 - protein, 17 aa, Homo sapiens
  Heavy chain CDR3 for antibody 3786 (IGHV3-33)
ARESTMVRGDNYYGLDA

SEQ ID NO: 7573 - protein, 9 aa, Homo sapiens
  Light chain CDR3 for antibody 3787 (IGKV1-27)
QKYNSAPYT

SEQ ID NO: 7574 - protein, 13 aa, Homo sapiens
  Heavy chain CDR3 for antibody 3787 (IGHV1-18)
AREGGSYYVSFDY

SEQ ID NO: 7575 - protein, 9 aa, Homo sapiens
  Light chain CDR3 for antibody 3788 (IGKV1D-13)
QQFNNYMYT

SEQ ID NO: 7576 - protein, 13 aa, Homo sapiens
  Heavy chain CDR3 for antibody 3788 (IGHV3-33)
ARGGVRGVIGFDY

SEQ ID NO: 7577 - protein, 9 aa, Homo sapiens
  Light chain CDR3 for antibody 3789 (IGKV1-9)
QQLNSYPYT

SEQ ID NO: 7578 - protein, 16 aa, Homo sapiens
  Heavy chain CDR3 for antibody 3789 (IGHV1-24)
ATEGAVAGYYYYGMDV

SEQ ID NO: 7579 - protein, 9 aa, Homo sapiens
  Light chain CDR3 for antibody 3790 (IGKV1-9)
QQFNSYPFT

SEQ ID NO: 7580 - protein, 17 aa, Homo sapiens
  Heavy chain CDR3 for antibody 3790 (IGHV3-30)
AREITMVRGDNYYGLDV

SEQ ID NO: 7581 - protein, 9 aa, Homo sapiens
  Light chain CDR3 for antibody 3791 (IGKV1-27)
QKYNSAPWT

SEQ ID NO: 7582 - protein, 10 aa, Homo sapiens
  Heavy chain CDR3 for antibody 3791 (IGHV3-33)
AREAVAGFDY

SEQ ID NO: 7583 - protein, 9 aa, Homo sapiens
  Light chain CDR3 for antibody 3792 (IGKV1-5)
QQYNSYSRT

SEQ ID NO: 7584 - protein, 12 aa, Homo sapiens
  Heavy chain CDR3 for antibody 3792 (IGHV3-20)
ARDWGDGDYFDY

SEQ ID NO: 7585 - protein, 9 aa, Homo sapiens
  Light chain CDR3 for antibody 3793 (IGKV1-9)
QQLNSYPYT

SEQ ID NO: 7586 - protein, 15 aa, Homo sapiens
  Heavy chain CDR3 for antibody 3793 (IGHV1-46)
AREKSYGSGTSPFDY

SEQ ID NO: 7587 - protein, 9 aa, Homo sapiens
  Light chain CDR3 for antibody 3794 (IGKV1-27)
QKYNSAPFT

SEQ ID NO: 7588 - protein, 16 aa, Homo sapiens
  Heavy chain CDR3 for antibody 3794 (IGHV1-46)
ASRITGTYYYYYGMDV

SEQ ID NO: 7589 - protein, 9 aa, Homo sapiens
  Light chain CDR3 for antibody 3795 (IGKV1-9)
QQLNSYPFT

SEQ ID NO: 7590 - protein, 9 aa, Homo sapiens
  Heavy chain CDR3 for antibody 3795 (IGHV3-33)
ARTLLYFDY

SEQ ID NO: 7591 - protein, 9 aa, Homo sapiens
  Light chain CDR3 for antibody 3796 (IGKV1-6)
LQDYNYPRT

SEQ ID NO: 7592 - protein, 9 aa, Homo sapiens
  Heavy chain CDR3 for antibody 3796 (IGHV1-18)
ARDWGSFDY

SEQ ID NO: 7593 - protein, 9 aa, Homo sapiens
  Light chain CDR3 for antibody 3797 (IGKV1D-13)
QQFNNYMYT

SEQ ID NO: 7594 - protein, 10 aa, Homo sapiens
  Heavy chain CDR3 for antibody 3797 (IGHV3-48)
ARESTDGMDV

SEQ ID NO: 7595 - protein, 9 aa, Homo sapiens
  Light chain CDR3 for antibody 3798 (IGKV5-2)
LQHDNFPWT

SEQ ID NO: 7596 - protein, 10 aa, Homo sapiens
  Heavy chain CDR3 for antibody 3798 (IGHV3-33)
AREGVGGMDV

SEQ ID NO: 7597 - protein, 9 aa, Homo sapiens
  Light chain CDR3 for antibody 3799 (IGKV1-9)
QQLNSYPPT

SEQ ID NO: 7598 - protein, 14 aa, Homo sapiens
  Heavy chain CDR3 for antibody 3799 (IGHV4-59)
AREGMQLWPTAFDI

SEQ ID NO: 7599 - protein, 9 aa, Homo sapiens
  Light chain CDR3 for antibody 3800 (IGKV1-9)
QQLNSYPYT

SEQ ID NO: 7600 - protein, 11 aa, Homo sapiens
  Heavy chain CDR3 for antibody 3800 (IGHV3-64)
ARGLHYYGMDV

SEQ ID NO: 7601 - protein, 10 aa, Homo sapiens
  Light chain CDR3 for antibody 3801 (IGKV3D-20)
QQYGSSLTWT

SEQ ID NO: 7602 - protein, 14 aa, Homo sapiens
  Heavy chain CDR3 for antibody 3801 (IGHV3-33)
ARGARYFDYYGMDV

SEQ ID NO: 7603 - protein, 9 aa, Homo sapiens
  Light chain CDR3 for antibody 3802 (IGKV6-21)
HQSSSLPYT

SEQ ID NO: 7604 - protein, 10 aa, Homo sapiens
  Heavy chain CDR3 for antibody 3802 (IGHV3-33)
ARESTDGMDV

SEQ ID NO: 7605 - protein, 9 aa, Homo sapiens
  Light chain CDR3 for antibody 3803 (IGKV3-11)
QQRSNWPRT

SEQ ID NO: 7606 - protein, 9 aa, Homo sapiens
  Heavy chain CDR3 for antibody 3803 (IGHV3-23)
AKGLGIFDY

SEQ ID NO: 7607 - protein, 9 aa, Homo sapiens
  Light chain CDR3 for antibody 3804 (IGKV1-9)
QQLNSYPYT

SEQ ID NO: 7608 - protein, 11 aa, Homo sapiens
  Heavy chain CDR3 for antibody 3804 (IGHV4-34)
ARPGTGDAFDI

SEQ ID NO: 7609 - protein, 9 aa, Homo sapiens
  Light chain CDR3 for antibody 3805 (IGKV1-9)
QQLNGFPYT

SEQ ID NO: 7610 - protein, 15 aa, Homo sapiens
  Heavy chain CDR3 for antibody 3805 (IGHV1-46)
AREGLTGYYPNWFDP

SEQ ID NO: 7611 - protein, 9 aa, Homo sapiens
  Light chain CDR3 for antibody 3806 (IGKV3-11)
QQRSNWLFT

SEQ ID NO: 7612 - protein, 15 aa, Homo sapiens
  Heavy chain CDR3 for antibody 3806 (IGHV1-46)
ARDIVVVPAYSAFDI

SEQ ID NO: 7613 - protein, 9 aa, Homo sapiens
  Light chain CDR3 for antibody 3807 (IGKV1-9)
QQFNSHPFT

SEQ ID NO: 7614 - protein, 13 aa, Homo sapiens
  Heavy chain CDR3 for antibody 3807 (IGHV3-33)
ARDYCSGDCYPDP

SEQ ID NO: 7615 - protein, 9 aa, Homo sapiens
  Light chain CDR3 for antibody 3808 (IGKV1-9)
QQLNGYPYT

SEQ ID NO: 7616 - protein, 15 aa, Homo sapiens
  Heavy chain CDR3 for antibody 3808 (IGHV1-46)
AREKYYVSGSYPFAY

SEQ ID NO: 7617 - protein, 9 aa, Homo sapiens
  Light chain CDR3 for antibody 3809 (IGKV1-9)
QQLNGYPYT

SEQ ID NO: 7618 - protein, 9 aa, Homo sapiens
  Heavy chain CDR3 for antibody 3809 (IGHV1-46)
ARANWAPDY

SEQ ID NO: 7619 - protein, 9 aa, Homo sapiens
  Light chain CDR3 for antibody 3810 (IGKV1D-13)
QQFNNYMYT

SEQ ID NO: 7620 - protein, 16 aa, Homo sapiens
  Heavy chain CDR3 for antibody 3810 (IGHV1-18)
AREGDTMVRGVIAFDY

SEQ ID NO: 7621 - protein, 9 aa, Homo sapiens
  Light chain CDR3 for antibody 3811 (IGKV1-9)
QQLNGYPYT

SEQ ID NO: 7622 - protein, 15 aa, Homo sapiens
  Heavy chain CDR3 for antibody 3811 (IGHV1-46)
AREKDYGSGSYAFDY

SEQ ID NO: 7623 - protein, 9 aa, Homo sapiens
  Light chain CDR3 for antibody 3812 (IGKV1D-13)
QQFNNYPRT

SEQ ID NO: 7624 - protein, 13 aa, Homo sapiens
  Heavy chain CDR3 for antibody 3812 (IGHV1-24)
ATDRYSGRNYFDY

SEQ ID NO: 7625 - protein, 9 aa, Homo sapiens
  Light chain CDR3 for antibody 3813 (IGKV1D-13)
QQFNNYPRT

SEQ ID NO: 7626 - protein, 10 aa, Homo sapiens
  Heavy chain CDR3 for antibody 3813 (IGHV3-33)
AREAVAGFDY

SEQ ID NO: 7627 - protein, 9 aa, Homo sapiens
  Light chain CDR3 for antibody 3814 (IGKV1D-16)
QQYNSYPLT

SEQ ID NO: 7628 - protein, 15 aa, Homo sapiens
  Heavy chain CDR3 for antibody 3814 (IGHV3-33)
ARNYDILTGYSPFDY

SEQ ID NO: 7629 - protein, 8 aa, Homo sapiens
  Light chain CDR3 for antibody 3815 (IGKV3-20)
QQYGSSFT

SEQ ID NO: 7630 - protein, 19 aa, Homo sapiens
  Heavy chain CDR3 for antibody 3815 (IGHV3-33)
ARDPNDILTGSFYYYGMDV

SEQ ID NO: 7631 - protein, 9 aa, Homo sapiens
  Light chain CDR3 for antibody 3816 (IGKV1-9)
QQLNSYPFT

SEQ ID NO: 7632 - protein, 10 aa, Homo sapiens
  Heavy chain CDR3 for antibody 3816 (IGHV3-33)
AREATEGFDY

SEQ ID NO: 7633 - protein, 9 aa, Homo sapiens
  Light chain CDR3 for antibody 3817 (IGKV1-9)
QQLNSYPRT

SEQ ID NO: 7634 - protein, 14 aa, Homo sapiens
  Heavy chain CDR3 for antibody 3817 (IGHV4-59)
ARESRVRAYWYFDL

SEQ ID NO: 7635 - protein, 9 aa, Homo sapiens
  Light chain CDR3 for antibody 3818 (IGKV1-6)
LQDYNYPWT

SEQ ID NO: 7636 - protein, 18 aa, Homo sapiens
  Heavy chain CDR3 for antibody 3818 (IGHV3-11)
ARDSSSWYPYYYYYGMDV

SEQ ID NO: 7637 - protein, 9 aa, Homo sapiens
  Light chain CDR3 for antibody 3819 (IGKV1-9)
QQLNGYPYT

SEQ ID NO: 7638 - protein, 15 aa, Homo sapiens
  Heavy chain CDR3 for antibody 3819 (IGHV1-46)
AREKYYGSGRDPFDY

SEQ ID NO: 7639 - protein, 9 aa, Homo sapiens
  Light chain CDR3 for antibody 3820 (IGKV1-6)
LQDYNYPYT

SEQ ID NO: 7640 - protein, 10 aa, Homo sapiens
  Heavy chain CDR3 for antibody 3820 (IGHV3-33)
ARESVAGFDY

SEQ ID NO: 7641 - protein, 9 aa, Homo sapiens
  Light chain CDR3 for antibody 3821 (IGKV1-9)
QQLNGYPYT

SEQ ID NO: 7642 - protein, 15 aa, Homo sapiens
  Heavy chain CDR3 for antibody 3821 (IGHV1-46)
AREKCYGSASYPFDY

SEQ ID NO: 7643 - protein, 9 aa, Homo sapiens
  Light chain CDR3 for antibody 3822 (IGKV1-9)
HQLISYPYT

SEQ ID NO: 7644 - protein, 17 aa, Homo sapiens
  Heavy chain CDR3 for antibody 3822 (IGHV3-33)
AREITMVRGDNYYGMDV

SEQ ID NO: 7645 - protein, 9 aa, Homo sapiens
  Light chain CDR3 for antibody 3823 (IGKV1-39)
QQSYSTPYT

SEQ ID NO: 7646 - protein, 15 aa, Homo sapiens
  Heavy chain CDR3 for antibody 3823 (IGHV1-46)
AREKYYGSGSYPFDY

SEQ ID NO: 7647 - protein, 9 aa, Homo sapiens
  Light chain CDR3 for antibody 3824 (IGKV1D-17)
LQHNSYPYT

SEQ ID NO: 7648 - protein, 15 aa, Homo sapiens
  Heavy chain CDR3 for antibody 3824 (IGHV1-46)
AREGLTGYYPNWFDP

SEQ ID NO: 7649 - protein, 9 aa, Homo sapiens
  Light chain CDR3 for antibody 3825 (IGKV1-6)
LQDYNYPWT

SEQ ID NO: 7650 - protein, 15 aa, Homo sapiens
  Heavy chain CDR3 for antibody 3825 (IGHV1-46)
ARDLVVVPAAMGFDY

SEQ ID NO: 7651 - protein, 9 aa, Homo sapiens
  Light chain CDR3 for antibody 3826 (IGKV4-1)
QQYYSTPPT

SEQ ID NO: 7652 - protein, 12 aa, Homo sapiens
  Heavy chain CDR3 for antibody 3826 (IGHV4-61)
ARDTSSGWFFDY

SEQ ID NO: 7653 - protein, 9 aa, Homo sapiens
  Light chain CDR3 for antibody 3827 (IGKV1-9)
QQLNSYPWT

SEQ ID NO: 7654 - protein, 13 aa, Homo sapiens
  Heavy chain CDR3 for antibody 3827 (IGHV3-33)
AREYCGGDCYGDY

SEQ ID NO: 7655 - protein, 9 aa, Homo sapiens
  Light chain CDR3 for antibody 3828 (IGKV6-21)
HQSSSLPHT

SEQ ID NO: 7656 - protein, 14 aa, Homo sapiens
  Heavy chain CDR3 for antibody 3828 (IGHV3-11)
AREEDIVATSYFDY

SEQ ID NO: 7657 - protein, 9 aa, Homo sapiens
  Light chain CDR3 for antibody 3829 (IGKV1-9)
QQLNSYPFT

SEQ ID NO: 7658 - protein, 17 aa, Homo sapiens
  Heavy chain CDR3 for antibody 3829 (IGHV3-33)
AREITLVRGDNYYGLDV

SEQ ID NO: 7659 - protein, 9 aa, Homo sapiens
  Light chain CDR3 for antibody 3830 (IGKV1-9)
QQLNSYPFT

SEQ ID NO: 7660 - protein, 19 aa, Homo sapiens
  Heavy chain CDR3 for antibody 3830 (IGHV3-33)
ARDPNDILTGSFYYYGMDV

SEQ ID NO: 7661 - protein, 9 aa, Homo sapiens
  Light chain CDR3 for antibody 3831 (IGKV1-9)
QQLNSYPFT

SEQ ID NO: 7662 - protein, 10 aa, Homo sapiens
  Heavy chain CDR3 for antibody 3831 (IGHV3-33)
ARESGEGFDP

SEQ ID NO: 7663 - protein, 9 aa, Homo sapiens
  Light chain CDR3 for antibody 3832 (IGKV1D-17)
LQHNSYPWT

SEQ ID NO: 7664 - protein, 15 aa, Homo sapiens
  Heavy chain CDR3 for antibody 3832 (IGHV1-8)
ARRATTGYYYYGMDV

SEQ ID NO: 7665 - protein, 9 aa, Homo sapiens
  Light chain CDR3 for antibody 3833 (IGKV1-9)
QQLNSYPYT

SEQ ID NO: 7666 - protein, 14 aa, Homo sapiens
  Heavy chain CDR3 for antibody 3833 (IGHV3-23)
AKDRAVAGTYYFDY

SEQ ID NO: 7667 - protein, 9 aa, Homo sapiens
  Light chain CDR3 for antibody 3834 (IGKV1-17)
LQHNSYPYT

SEQ ID NO: 7668 - protein, 20 aa, Homo sapiens
  Heavy chain CDR3 for antibody 3834 (IGHV3-11)
ASQLLWFGELLGDYYYGMDV

SEQ ID NO: 7669 - protein, 9 aa, Homo sapiens
  Light chain CDR3 for antibody 3835 (IGKV1-37)
QRTYNAPYT

SEQ ID NO: 7670 - protein, 11 aa, Homo sapiens
  Heavy chain CDR3 for antibody 3835 (IGHV3-33)
ARNYYYYGMDV

SEQ ID NO: 7671 - protein, 9 aa, Homo sapiens
  Light chain CDR3 for antibody 3836 (IGKV1D-16)
QQYNSYPYT

SEQ ID NO: 7672 - protein, 10 aa, Homo sapiens
  Heavy chain CDR3 for antibody 3836 (IGHV3-33)
ASRLVNLFDY

SEQ ID NO: 7673 - protein, 9 aa, Homo sapiens
  Light chain CDR3 for antibody 3837 (IGKV6-21)
HQSSSLPWT

SEQ ID NO: 7674 - protein, 12 aa, Homo sapiens
  Heavy chain CDR3 for antibody 3837 (IGHV4-39)
ASDGSGSYSYDY

SEQ ID NO: 7675 - protein, 9 aa, Homo sapiens
  Light chain CDR3 for antibody 3838 (IGKV1-9)
QQLNSYPYT

SEQ ID NO: 7676 - protein, 15 aa, Homo sapiens
  Heavy chain CDR3 for antibody 3838 (IGHV1-46)
AREKSHGSGSYPFAY

SEQ ID NO: 7677 - protein, 9 aa, Homo sapiens
  Light chain CDR3 for antibody 3839 (IGKV1-9)
QQLNGYPYT

SEQ ID NO: 7678 - protein, 15 aa, Homo sapiens
  Heavy chain CDR3 for antibody 3839 (IGHV1-46)
AREKYYGSGSSPFAS

SEQ ID NO: 7679 - protein, 9 aa, Homo sapiens
  Light chain CDR3 for antibody 3840 (IGKV6-21)
HQSSSLPYT

SEQ ID NO: 7680 - protein, 15 aa, Homo sapiens
  Heavy chain CDR3 for antibody 3840 (IGHV1-46)
AREGLTGYYPNWFDP

SEQ ID NO: 7681 - protein, 9 aa, Homo sapiens
  Light chain CDR3 for antibody 3841 (IGKV1-9)
QQLNGYPYT

SEQ ID NO: 7682 - protein, 15 aa, Homo sapiens
  Heavy chain CDR3 for antibody 3841 (IGHV1-46)
AREKYDGSWSYPFDY

SEQ ID NO: 7683 - protein, 9 aa, Homo sapiens
  Light chain CDR3 for antibody 3842 (IGKV1-12)
LQDYNYPRT

SEQ ID NO: 7684 - protein, 16 aa, Homo sapiens
  Heavy chain CDR3 for antibody 3842 (IGHV1-46)
ARGFVVVPAAVDAFDI

SEQ ID NO: 7685 - protein, 9 aa, Homo sapiens
  Light chain CDR3 for antibody 3843 (IGKV1-9)
QQLNGFPYT

SEQ ID NO: 7686 - protein, 13 aa, Homo sapiens
  Heavy chain CDR3 for antibody 3843 (IGHV1-18)
AREGGSYIVSFDY

SEQ ID NO: 7687 - protein, 9 aa, Homo sapiens
  Light chain CDR3 for antibody 3844 (IGKV1-9)
QQLNGYPYT

SEQ ID NO: 7688 - protein, 14 aa, Homo sapiens
  Heavy chain CDR3 for antibody 3844 (IGHV3-23)
AKDQIVATIGYFQH

SEQ ID NO: 7689 - protein, 9 aa, Homo sapiens
  Light chain CDR3 for antibody 3845 (IGKV1-9)
QQFNSHPFT

SEQ ID NO: 7690 - protein, 15 aa, Homo sapiens
  Heavy chain CDR3 for antibody 3845 (IGHV1-46)
AREGLTGYYPNWFDP

SEQ ID NO: 7691 - protein, 9 aa, Homo sapiens
  Light chain CDR3 for antibody 3846 (IGKV5-2)
LQHDNFPYT

SEQ ID NO: 7692 - protein, 11 aa, Homo sapiens
  Heavy chain CDR3 for antibody 3846 (IGHV3-33)
ARDGPLLAFDI

SEQ ID NO: 7693 - protein, 9 aa, Homo sapiens
  Light chain CDR3 for antibody 3847 (IGKV1-9)
QHLNSHPFT

SEQ ID NO: 7694 - protein, 17 aa, Homo sapiens
  Heavy chain CDR3 for antibody 3847 (IGHV3-33)
AREITMLRGDNYYGLDV

SEQ ID NO: 7695 - protein, 9 aa, Homo sapiens
  Light chain CDR3 for antibody 3848 (IGKV1-9)
QQLNGYPYT

SEQ ID NO: 7696 - protein, 15 aa, Homo sapiens
  Heavy chain CDR3 for antibody 3848 (IGHV1-46)
AIEKYYGSGSYPFDF

SEQ ID NO: 7697 - protein, 9 aa, Homo sapiens
  Light chain CDR3 for antibody 3849 (IGKV1D-17)
LQHNSYPYT

SEQ ID NO: 7698 - protein, 14 aa, Homo sapiens
  Heavy chain CDR3 for antibody 3849 (IGHV3-33)
ARGGVLRYFDWLLG

SEQ ID NO: 7699 - protein, 9 aa, Homo sapiens
  Light chain CDR3 for antibody 3850 (IGKV1-9)
QQLNGYPYT

SEQ ID NO: 7700 - protein, 9 aa, Homo sapiens
  Heavy chain CDR3 for antibody 3850 (IGHV3-23)
AKEAVAGDY

SEQ ID NO: 7701 - protein, 9 aa, Homo sapiens
  Light chain CDR3 for antibody 3851 (IGKV1-9)
QQLNSYPYT

SEQ ID NO: 7702 - protein, 17 aa, Homo sapiens
  Heavy chain CDR3 for antibody 3851 (IGHV3-33)
AREITMARGDNSYGMDV

SEQ ID NO: 7703 - protein, 9 aa, Homo sapiens
  Light chain CDR3 for antibody 3852 (IGKV1D-17)
LQHNSYPLT

SEQ ID NO: 7704 - protein, 13 aa, Homo sapiens
  Heavy chain CDR3 for antibody 3852 (IGHV1-46)
AREGGNYIVSFDY

SEQ ID NO: 7705 - protein, 9 aa, Homo sapiens
  Light chain CDR3 for antibody 3853 (IGKV1-6)
LQDYNYPYT

SEQ ID NO: 7706 - protein, 14 aa, Homo sapiens
  Heavy chain CDR3 for antibody 3853 (IGHV1-24)
ATAGILTGSDAFDI

SEQ ID NO: 7707 - protein, 9 aa, Homo sapiens
  Light chain CDR3 for antibody 3854 (IGKV1-9)
QQLNSYPYT

SEQ ID NO: 7708 - protein, 14 aa, Homo sapiens
  Heavy chain CDR3 for antibody 3854 (IGHV1-46)
AREGEQQPFNWFDP

SEQ ID NO: 7709 - protein, 9 aa, Homo sapiens
  Light chain CDR3 for antibody 3855 (IGKV1-9)
QQLNSYPLT

SEQ ID NO: 7710 - protein, 12 aa, Homo sapiens
  Heavy chain CDR3 for antibody 3855 (IGHV3-33)
ARDRYSGSPLDY

SEQ ID NO: 7711 - protein, 9 aa, Homo sapiens
  Light chain CDR3 for antibody 3856 (IGKV1-9)
QQLNSYPYT

SEQ ID NO: 7712 - protein, 17 aa, Homo sapiens
  Heavy chain CDR3 for antibody 3856 (IGHV3-33)
AREINMVRGDNYYGMDA

SEQ ID NO: 7713 - protein, 9 aa, Homo sapiens
  Light chain CDR3 for antibody 3857 (IGKV1-16)
QQYNSYPWT

SEQ ID NO: 7714 - protein, 9 aa, Homo sapiens
  Heavy chain CDR3 for antibody 3857 (IGHV1-24)
ATASGDFDY

SEQ ID NO: 7715 - protein, 9 aa, Homo sapiens
  Light chain CDR3 for antibody 3858 (IGKV1-9)
QQLNSYPFT

SEQ ID NO: 7716 - protein, 17 aa, Homo sapiens
  Heavy chain CDR3 for antibody 3858 (IGHV3-30)
ARESTMVRGDNYYAMEV

SEQ ID NO: 7717 - protein, 9 aa, Homo sapiens
  Light chain CDR3 for antibody 3859 (IGKV1-9)
QQLNSYPFT

SEQ ID NO: 7718 - protein, 17 aa, Homo sapiens
  Heavy chain CDR3 for antibody 3859 (IGHV3-66)
ERESTMVRGYNYYGMDV

SEQ ID NO: 7719 - protein, 9 aa, Homo sapiens
  Light chain CDR3 for antibody 3860 (IGKV1-9)
QQLNSYPYT

SEQ ID NO: 7720 - protein, 15 aa, Homo sapiens
  Heavy chain CDR3 for antibody 3860 (IGHV1-46)
AREKYYGSATYPFDY

SEQ ID NO: 7721 - protein, 9 aa, Homo sapiens
  Light chain CDR3 for antibody 3861 (IGKV1-9)
QQLNSYPFT

SEQ ID NO: 7722 - protein, 10 aa, Homo sapiens
  Heavy chain CDR3 for antibody 3861 (IGHV3-33)
AREGTDGFDP

SEQ ID NO: 7723 - protein, 9 aa, Homo sapiens
  Light chain CDR3 for antibody 3862 (IGKV1-9)
QQLNGYPYT

SEQ ID NO: 7724 - protein, 15 aa, Homo sapiens
  Heavy chain CDR3 for antibody 3862 (IGHV1-46)
AREKSHGSGSYPIDY

SEQ ID NO: 7725 - protein, 9 aa, Homo sapiens
  Light chain CDR3 for antibody 3863 (IGKV1-9)
LLHTSYPYT

SEQ ID NO: 7726 - protein, 10 aa, Homo sapiens
  Heavy chain CDR3 for antibody 3863 (IGHV3-33)
AREAVAGFDY

SEQ ID NO: 7727 - protein, 9 aa, Homo sapiens
  Light chain CDR3 for antibody 3864 (IGKV1-9)
QQLNSYPYT

SEQ ID NO: 7728 - protein, 5 aa, Homo sapiens
  Heavy chain CDR3 for antibody 3864 (IGHV1-46)
AREKY

SEQ ID NO: 7729 - protein, 9 aa, Homo sapiens
  Light chain CDR3 for antibody 3865 (IGKV1-9)
QQLNSYPYT

SEQ ID NO: 7730 - protein, 15 aa, Homo sapiens
  Heavy chain CDR3 for antibody 3865 (IGHV1-46)
AREKYYGSGNYPIDS

SEQ ID NO: 7731 - protein, 9 aa, Homo sapiens
  Light chain CDR3 for antibody 3866 (IGKV1-9)
QQLNSYPYT

SEQ ID NO: 7732 - protein, 13 aa, Homo sapiens
  Heavy chain CDR3 for antibody 3866 (IGHV3-30)
ARDYCGGDYSPDP

SEQ ID NO: 7733 - protein, 9 aa, Homo sapiens
  Light chain CDR3 for antibody 3867 (IGKV1-9)
HQLISYPYT

SEQ ID NO: 7734 - protein, 10 aa, Homo sapiens
  Heavy chain CDR3 for antibody 3867 (IGHV3-33)
ARESVAGFDY

SEQ ID NO: 7735 - protein, 9 aa, Homo sapiens
  Light chain CDR3 for antibody 3868 (IGKV1-9)
QQLNSYPFT

SEQ ID NO: 7736 - protein, 12 aa, Homo sapiens
  Heavy chain CDR3 for antibody 3868 (IGHV3-23)
AKEGIAAAGLDY

SEQ ID NO: 7737 - protein, 9 aa, Homo sapiens
  Light chain CDR3 for antibody 3869 (IGKV1-9)
QQLNSYPYT

SEQ ID NO: 7738 - protein, 15 aa, Homo sapiens
  Heavy chain CDR3 for antibody 3869 (IGHV1-46)
AREKYYGAGSYAFDD

SEQ ID NO: 7739 - protein, 9 aa, Homo sapiens
  Light chain CDR3 for antibody 3870 (IGKV1-27)
QKYNSAPWT

SEQ ID NO: 7740 - protein, 12 aa, Homo sapiens
  Heavy chain CDR3 for antibody 3870 (IGHV1-46)
ARVASSWYYFDY

SEQ ID NO: 7741 - protein, 9 aa, Homo sapiens
  Light chain CDR3 for antibody 3871 (IGKV1-13)
QQLNSYPYT

SEQ ID NO: 7742 - protein, 14 aa, Homo sapiens
  Heavy chain CDR3 for antibody 3871 (IGHV3-33)
AREGLGIGGYGMDV

SEQ ID NO: 7743 - protein, 9 aa, Homo sapiens
  Light chain CDR3 for antibody 3872 (IGKV1-9)
QQLNGYPYT

SEQ ID NO: 7744 - protein, 15 aa, Homo sapiens
  Heavy chain CDR3 for antibody 3872 (IGHV1-46)
AREKYYGSGSSPFDY

SEQ ID NO: 7745 - protein, 8 aa, Homo sapiens
  Light chain CDR3 for antibody 3873 (IGKV3D-20)
QQYGSSWT

SEQ ID NO: 7746 - protein, 17 aa, Homo sapiens
  Heavy chain CDR3 for antibody 3873 (IGHV3-33)
AREITMLRGDNYYGLDV

SEQ ID NO: 7747 - protein, 9 aa, Homo sapiens
  Light chain CDR3 for antibody 3874 (IGKV1-9)
QQLNSYPYT

SEQ ID NO: 7748 - protein, 14 aa, Homo sapiens
  Heavy chain CDR3 for antibody 3874 (IGHV1-46)
AREGYSGYLVYFDY

SEQ ID NO: 7749 - protein, 9 aa, Homo sapiens
  Light chain CDR3 for antibody 3875 (IGKV1-9)
QQLNGYPYT

SEQ ID NO: 7750 - protein, 15 aa, Homo sapiens
  Heavy chain CDR3 for antibody 3875 (IGHV1-46)
AREKYYGLGSYPFDC

SEQ ID NO: 7751 - protein, 9 aa, Homo sapiens
  Light chain CDR3 for antibody 3876 (IGKV1-9)
QQLNGYPYT

SEQ ID NO: 7752 - protein, 14 aa, Homo sapiens
  Heavy chain CDR3 for antibody 3876 (IGHV1-18)
AREGYSGYLVYFDY

SEQ ID NO: 7753 - protein, 9 aa, Homo sapiens
  Light chain CDR3 for antibody 3877 (IGKV1-9)
QQLNSYPYT

SEQ ID NO: 7754 - protein, 14 aa, Homo sapiens
  Heavy chain CDR3 for antibody 3877 (IGHV4-59)
ARDYGSGSYYTFDY

SEQ ID NO: 7755 - protein, 9 aa, Homo sapiens
  Light chain CDR3 for antibody 3878 (IGKV1-12)
QQLNGYPYT

SEQ ID NO: 7756 - protein, 19 aa, Homo sapiens
  Heavy chain CDR3 for antibody 3878 (IGHV1-18)
ARDHGYCSSTSCYRAWFDP

SEQ ID NO: 7757 - protein, 9 aa, Homo sapiens
  Light chain CDR3 for antibody 3879 (IGKV1-39)
QQSFITPYT

SEQ ID NO: 7758 - protein, 20 aa, Homo sapiens
  Heavy chain CDR3 for antibody 3879 (IGHV4-59)
ARDRGSGSPPHYYYYYGMDV

SEQ ID NO: 7759 - protein, 9 aa, Homo sapiens
  Light chain CDR3 for antibody 3880 (IGKV1-9)
QQLNSYPYT

SEQ ID NO: 7760 - protein, 15 aa, Homo sapiens
  Heavy chain CDR3 for antibody 3880 (IGHV1-46)
ARENYYGSASSPFDY

SEQ ID NO: 7761 - protein, 9 aa, Homo sapiens
  Light chain CDR3 for antibody 3881 (IGKV1D-17)
QQLNSYPYT

SEQ ID NO: 7762 - protein, 13 aa, Homo sapiens
  Heavy chain CDR3 for antibody 3881 (IGHV1-46)
ARGTGTTGGSFDY

SEQ ID NO: 7763 - protein, 9 aa, Homo sapiens
  Light chain CDR3 for antibody 3882 (IGKV1D-13)
QQFNNYPLT

SEQ ID NO: 7764 - protein, 15 aa, Homo sapiens
  Heavy chain CDR3 for antibody 3882 (IGHV1-46)
AGPPYYDILTGYPRH

SEQ ID NO: 7765 - protein, 9 aa, Homo sapiens
  Light chain CDR3 for antibody 3883 (IGKV1-9)
QQLNGYPYT

SEQ ID NO: 7766 - protein, 15 aa, Homo sapiens
  Heavy chain CDR3 for antibody 3883 (IGHV1-46)
AGEEYYGSGSYPFDY

SEQ ID NO: 7767 - protein, 9 aa, Homo sapiens
  Light chain CDR3 for antibody 3884 (IGKV1-6)
LQDYNYPLT

SEQ ID NO: 7768 - protein, 15 aa, Homo sapiens
  Heavy chain CDR3 for antibody 3884 (IGHV3-66)
AREADYGDYPDAFDI

SEQ ID NO: 7769 - protein, 9 aa, Homo sapiens
  Light chain CDR3 for antibody 3885 (IGKV1-9)
QQFNSHPFT

SEQ ID NO: 7770 - protein, 13 aa, Homo sapiens
  Heavy chain CDR3 for antibody 3885 (IGHV3-33)
AREGGSYIVSFDY

SEQ ID NO: 7771 - protein, 9 aa, Homo sapiens
  Light chain CDR3 for antibody 3886 (IGKV3D-20)
QQYGSSPWT

SEQ ID NO: 7772 - protein, 17 aa, Homo sapiens
  Heavy chain CDR3 for antibody 3886 (IGHV3-20)
ARDYYGSGSYYNDAFDI

SEQ ID NO: 7773 - protein, 9 aa, Homo sapiens
  Light chain CDR3 for antibody 3887 (IGKV1-9)
QQFNSYPFT

SEQ ID NO: 7774 - protein, 17 aa, Homo sapiens
  Heavy chain CDR3 for antibody 3887 (IGHV3-33)
AREITMVRGDNHYGMDV

SEQ ID NO: 7775 - protein, 9 aa, Homo sapiens
  Light chain CDR3 for antibody 3888 (IGKV1-9)
QQLISYPYT

SEQ ID NO: 7776 - protein, 13 aa, Homo sapiens
  Heavy chain CDR3 for antibody 3888 (IGHV3-33)
ARDYCSGDCSTDP

SEQ ID NO: 7777 - protein, 9 aa, Homo sapiens
  Light chain CDR3 for antibody 3889 (IGKV1-6)
LQDYNYPWT

SEQ ID NO: 7778 - protein, 15 aa, Homo sapiens
  Heavy chain CDR3 for antibody 3889 (IGHV1-24)
ATQDIVVVPAAYFDY

SEQ ID NO: 7779 - protein, 9 aa, Homo sapiens
  Light chain CDR3 for antibody 3890 (IGKV1-9)
QQLNGYPYT

SEQ ID NO: 7780 - protein, 17 aa, Homo sapiens
  Heavy chain CDR3 for antibody 3890 (IGHV3-33)
AREITMVRGDNYYGLDV

SEQ ID NO: 7781 - protein, 9 aa, Homo sapiens
  Light chain CDR3 for antibody 3891 (IGKV1-9)
QQLNSYPFT

SEQ ID NO: 7782 - protein, 17 aa, Homo sapiens
  Heavy chain CDR3 for antibody 3891 (IGHV3-33)
AREITLVRGDNSYGLDA

SEQ ID NO: 7783 - protein, 9 aa, Homo sapiens
  Light chain CDR3 for antibody 3892 (IGKV1-9)
QQFNSFPFT

SEQ ID NO: 7784 - protein, 17 aa, Homo sapiens
  Heavy chain CDR3 for antibody 3892 (IGHV3-33)
AREITVVRGDNYYGLDV

SEQ ID NO: 7785 - protein, 9 aa, Homo sapiens
  Light chain CDR3 for antibody 3893 (IGKV1-16)
QQYNSYPLT

SEQ ID NO: 7786 - protein, 16 aa, Homo sapiens
  Heavy chain CDR3 for antibody 3893 (IGHV3-33)
AREGDSSSWWKDWFDP

SEQ ID NO: 7787 - protein, 9 aa, Homo sapiens
  Light chain CDR3 for antibody 3894 (IGKV1-9)
QQLNGFPYT

SEQ ID NO: 7788 - protein, 15 aa, Homo sapiens
  Heavy chain CDR3 for antibody 3894 (IGHV1-46)
AREKYYGSGSYPFDS

SEQ ID NO: 7789 - protein, 9 aa, Homo sapiens
  Light chain CDR3 for antibody 3895 (IGKV1-17)
QQLNGYPYT

SEQ ID NO: 7790 - protein, 16 aa, Homo sapiens
  Heavy chain CDR3 for antibody 3895 (IGHV1-46)
ARDGNPENYYYYGMDV

SEQ ID NO: 7791 - protein, 9 aa, Homo sapiens
  Light chain CDR3 for antibody 3896 (IGKV1-9)
QQLNGYPYT

SEQ ID NO: 7792 - protein, 15 aa, Homo sapiens
  Heavy chain CDR3 for antibody 3896 (IGHV1-46)
AREKYYGAGSDPFDY

SEQ ID NO: 7793 - protein, 9 aa, Homo sapiens
  Light chain CDR3 for antibody 3897 (IGKV1-9)
QQLNSYPFT

SEQ ID NO: 7794 - protein, 17 aa, Homo sapiens
  Heavy chain CDR3 for antibody 3897 (IGHV3-33)
AREITRARGDNYYGMDA

SEQ ID NO: 7795 - protein, 9 aa, Homo sapiens
  Light chain CDR3 for antibody 3898 (IGKV1-9)
QQLNSYPYT

SEQ ID NO: 7796 - protein, 17 aa, Homo sapiens
  Heavy chain CDR3 for antibody 3898 (IGHV3-33)
ARESTMVRGDNYYGMDV

SEQ ID NO: 7797 - protein, 9 aa, Homo sapiens
  Light chain CDR3 for antibody 3899 (IGKV1-9)
QQLNSYPFT

SEQ ID NO: 7798 - protein, 17 aa, Homo sapiens
  Heavy chain CDR3 for antibody 3899 (IGHV3-33)
VSEITMVRGDNYYGMDA

SEQ ID NO: 7799 - protein, 9 aa, Homo sapiens
  Light chain CDR3 for antibody 3900 (IGKV1D-13)
QQFNNYPYT

SEQ ID NO: 7800 - protein, 17 aa, Homo sapiens
  Heavy chain CDR3 for antibody 3900 (IGHV3-33)
AREITMLRGDNYYGLDV

SEQ ID NO: 7801 - protein, 9 aa, Homo sapiens
  Light chain CDR3 for antibody 3901 (IGKV1-6)
LQDYNYPRT

SEQ ID NO: 7802 - protein, 13 aa, Homo sapiens
  Heavy chain CDR3 for antibody 3901 (IGHV3-33)
ARDRYSGSYPFDY

SEQ ID NO: 7803 - protein, 9 aa, Homo sapiens
  Light chain CDR3 for antibody 3902 (IGKV6-21)
HQSSSLPYT

SEQ ID NO: 7804 - protein, 13 aa, Homo sapiens
  Heavy chain CDR3 for antibody 3902 (IGHV3-33)
ARDYCSGDCYPDP

SEQ ID NO: 7805 - protein, 9 aa, Homo sapiens
  Light chain CDR3 for antibody 3903 (IGKV1-17)
LQHNSYPYT

SEQ ID NO: 7806 - protein, 13 aa, Homo sapiens
  Heavy chain CDR3 for antibody 3903 (IGHV1-46)
ARRDFDWLLDVDY

SEQ ID NO: 7807 - protein, 9 aa, Homo sapiens
  Light chain CDR3 for antibody 3904 (IGKV1D-17)
LQHNSYPYT

SEQ ID NO: 7808 - protein, 6 aa, Homo sapiens
  Heavy chain CDR3 for antibody 3904 (IGHV3-33)
AREIDY

SEQ ID NO: 7809 - protein, 9 aa, Homo sapiens
  Light chain CDR3 for antibody 3905 (IGKV1-9)
QQLNSYPYT

SEQ ID NO: 7810 - protein, 15 aa, Homo sapiens
  Heavy chain CDR3 for antibody 3905 (IGHV1-46)
AREKCDGSGSDPFDY

SEQ ID NO: 7811 - protein, 9 aa, Homo sapiens
  Light chain CDR3 for antibody 3906 (IGKV1-9)
QQFNSHPFT

SEQ ID NO: 7812 - protein, 17 aa, Homo sapiens
  Heavy chain CDR3 for antibody 3906 (IGHV3-33)
AREITMVRGDNSYGLAV

SEQ ID NO: 7813 - protein, 9 aa, Homo sapiens
  Light chain CDR3 for antibody 3907 (IGKV1-9)
QQLNGYPYT

SEQ ID NO: 7814 - protein, 15 aa, Homo sapiens
  Heavy chain CDR3 for antibody 3907 (IGHV1-46)
AREKYYGSGTYPFYS

SEQ ID NO: 7815 - protein, 9 aa, Homo sapiens
  Light chain CDR3 for antibody 3908 (IGKV1-9)
QQLNSYPYT

SEQ ID NO: 7816 - protein, 15 aa, Homo sapiens
  Heavy chain CDR3 for antibody 3908 (IGHV1-46)
AREKYCGSGCYPFDD

SEQ ID NO: 7817 - protein, 9 aa, Homo sapiens
  Light chain CDR3 for antibody 3909 (IGKV1-9)
QQLNGYPYT

SEQ ID NO: 7818 - protein, 15 aa, Homo sapiens
  Heavy chain CDR3 for antibody 3909 (IGHV1-46)
SREKYYGSSSYPFDY

SEQ ID NO: 7819 - protein, 9 aa, Homo sapiens
  Light chain CDR3 for antibody 3910 (IGKV1-9)
QQLNGYPYT

SEQ ID NO: 7820 - protein, 15 aa, Homo sapiens
  Heavy chain CDR3 for antibody 3910 (IGHV1-46)
ARKKYYGSDSYPFDY

SEQ ID NO: 7821 - protein, 9 aa, Homo sapiens
  Light chain CDR3 for antibody 3911 (IGKV1-9)
QQLNSYPYT

SEQ ID NO: 7822 - protein, 15 aa, Homo sapiens
  Heavy chain CDR3 for antibody 3911 (IGHV1-46)
AREKYYGSGSSPIAY

SEQ ID NO: 7823 - protein, 9 aa, Homo sapiens
  Light chain CDR3 for antibody 3912 (IGKV1-9)
QQLNSYPYT

SEQ ID NO: 7824 - protein, 11 aa, Homo sapiens
  Heavy chain CDR3 for antibody 3912 (IGHV3-33)
ARDGYSSGWDY

SEQ ID NO: 7825 - protein, 9 aa, Homo sapiens
  Light chain CDR3 for antibody 3913 (IGKV1-9)
HQLNSYPYT

SEQ ID NO: 7826 - protein, 15 aa, Homo sapiens
  Heavy chain CDR3 for antibody 3913 (IGHV1-46)
AREKSYGSGSYPFDY

SEQ ID NO: 7827 - protein, 9 aa, Homo sapiens
  Light chain CDR3 for antibody 3914 (IGKV1-6)
LQDYNYPRT

SEQ ID NO: 7828 - protein, 11 aa, Homo sapiens
  Heavy chain CDR3 for antibody 3914 (IGHV1-2)
WGTMVRGVPDY

SEQ ID NO: 7829 - protein, 9 aa, Homo sapiens
  Light chain CDR3 for antibody 3915 (IGKV1-9)
QQLNSYPYT

SEQ ID NO: 7830 - protein, 13 aa, Homo sapiens
  Heavy chain CDR3 for antibody 3915 (IGHV3-33)
ARDYGGGDCYIDP

SEQ ID NO: 7831 - protein, 9 aa, Homo sapiens
  Light chain CDR3 for antibody 3916 (IGKV6-21)
QKYNSAPLT

SEQ ID NO: 7832 - protein, 16 aa, Homo sapiens
  Heavy chain CDR3 for antibody 3916 (IGHV1-46)
AREGGSGWDYYYGMDV

SEQ ID NO: 7833 - protein, 9 aa, Homo sapiens
  Light chain CDR3 for antibody 3917 (IGKV1-9)
QQLNSYPYT

SEQ ID NO: 7834 - protein, 11 aa, Homo sapiens
  Heavy chain CDR3 for antibody 3917 (IGHV1-8)
AREGSGSYLGY

SEQ ID NO: 7835 - protein, 9 aa, Homo sapiens
  Light chain CDR3 for antibody 3918 (IGKV1-6)
LQDYNYPRT

SEQ ID NO: 7836 - protein, 10 aa, Homo sapiens
  Heavy chain CDR3 for antibody 3918 (IGHV3-23)
AKEKWELFDI

SEQ ID NO: 7837 - protein, 9 aa, Homo sapiens
  Light chain CDR3 for antibody 3919 (IGKV1D-17)
LQHNSYPYT

SEQ ID NO: 7838 - protein, 15 aa, Homo sapiens
  Heavy chain CDR3 for antibody 3919 (IGHV3-53)
AREKSYGSGSYPFDY

SEQ ID NO: 7839 - protein, 9 aa, Homo sapiens
  Light chain CDR3 for antibody 3920 (IGKV1-9)
QQLNSYPYT

SEQ ID NO: 7840 - protein, 15 aa, Homo sapiens
  Heavy chain CDR3 for antibody 3920 (IGHV1-46)
ARQKYYGSGTYPFAY

SEQ ID NO: 7841 - protein, 9 aa, Homo sapiens
  Light chain CDR3 for antibody 3921 (IGKV1D-17)
LQHNSYPYT

SEQ ID NO: 7842 - protein, 10 aa, Homo sapiens
  Heavy chain CDR3 for antibody 3921 (IGHV3-33)
ARDAVAGFDY

SEQ ID NO: 7843 - protein, 9 aa, Homo sapiens
  Light chain CDR3 for antibody 3922 (IGKV1-9)
QQLNGFPYT

SEQ ID NO: 7844 - protein, 15 aa, Homo sapiens
  Heavy chain CDR3 for antibody 3922 (IGHV1-46)
ARENSYGSGRYPFDY

SEQ ID NO: 7845 - protein, 9 aa, Homo sapiens
  Light chain CDR3 for antibody 3923 (IGKV1-9)
QHLNSYPFT

SEQ ID NO: 7846 - protein, 15 aa, Homo sapiens
  Heavy chain CDR3 for antibody 3923 (IGHV1-46)
AREKYHGSGSYPFDY

SEQ ID NO: 7847 - protein, 9 aa, Homo sapiens
  Light chain CDR3 for antibody 3924 (IGKV1-9)
QQLNSYPFT

SEQ ID NO: 7848 - protein, 18 aa, Homo sapiens
  Heavy chain CDR3 for antibody 3924 (IGHV1-24)
ATDPHYDILTGPYYGMDV

SEQ ID NO: 7849 - protein, 9 aa, Homo sapiens
  Light chain CDR3 for antibody 3925 (IGKV1-9)
QQLNSYPFT

SEQ ID NO: 7850 - protein, 17 aa, Homo sapiens
  Heavy chain CDR3 for antibody 3925 (IGHV3-33)
AREIAMVRGDNYYGLDD

SEQ ID NO: 7851 - protein, 9 aa, Homo sapiens
  Light chain CDR3 for antibody 3926 (IGKV1-9)
QQLNGYPYT

SEQ ID NO: 7852 - protein, 15 aa, Homo sapiens
  Heavy chain CDR3 for antibody 3926 (IGHV1-46)
AIEKFYGSGSSPFDY

SEQ ID NO: 7853 - protein, 9 aa, Homo sapiens
  Light chain CDR3 for antibody 3927 (IGKV1-6)
LQDYNYPRT

SEQ ID NO: 7854 - protein, 16 aa, Homo sapiens
  Heavy chain CDR3 for antibody 3927 (IGHV3-33)
ARAGLLWFGELGWMDV

SEQ ID NO: 7855 - protein, 9 aa, Homo sapiens
  Light chain CDR3 for antibody 3928 (IGKV1-9)
QQLNSYPYT

SEQ ID NO: 7856 - protein, 15 aa, Homo sapiens
  Heavy chain CDR3 for antibody 3928 (IGHV1-46)
AGEKCYGSGSSPFDY

SEQ ID NO: 7857 - protein, 9 aa, Homo sapiens
  Light chain CDR3 for antibody 3929 (IGKV1-9)
QQFNGHPFT

SEQ ID NO: 7858 - protein, 17 aa, Homo sapiens
  Heavy chain CDR3 for antibody 3929 (IGHV3-33)
AREITMVRGDNYYGLDV

SEQ ID NO: 7859 - protein, 9 aa, Homo sapiens
  Light chain CDR3 for antibody 3930 (IGKV1-9)
QQLNGYPYT

SEQ ID NO: 7860 - protein, 15 aa, Homo sapiens
  Heavy chain CDR3 for antibody 3930 (IGHV1-46)
ARENYYGSGSYPFDY

SEQ ID NO: 7861 - protein, 9 aa, Homo sapiens
  Light chain CDR3 for antibody 3931 (IGKV1-9)
QQLNGYPYT

SEQ ID NO: 7862 - protein, 15 aa, Homo sapiens
  Heavy chain CDR3 for antibody 3931 (IGHV1-46)
AREKYYGSGSYPFNY

SEQ ID NO: 7863 - protein, 9 aa, Homo sapiens
  Light chain CDR3 for antibody 3932 (IGKV1-9)
QQLNSYPFT

SEQ ID NO: 7864 - protein, 17 aa, Homo sapiens
  Heavy chain CDR3 for antibody 3932 (IGHV3-33)
AREITMLRGDNSYGMDV

SEQ ID NO: 7865 - protein, 9 aa, Homo sapiens
  Light chain CDR3 for antibody 3933 (IGKV1-9)
QQLNSYPYT

SEQ ID NO: 7866 - protein, 15 aa, Homo sapiens
  Heavy chain CDR3 for antibody 3933 (IGHV1-46)
ARENYYGSGTYPFDY

SEQ ID NO: 7867 - protein, 9 aa, Homo sapiens
  Light chain CDR3 for antibody 3934 (IGKV6-21)
QKYGSSPLT

SEQ ID NO: 7868 - protein, 15 aa, Homo sapiens
  Heavy chain CDR3 for antibody 3934 (IGHV1-24)
ATGYYGSGSSEYFQH

SEQ ID NO: 7869 - protein, 9 aa, Homo sapiens
  Light chain CDR3 for antibody 3935 (IGKV1-9)
QQFNSHPFT

SEQ ID NO: 7870 - protein, 17 aa, Homo sapiens
  Heavy chain CDR3 for antibody 3935 (IGHV3-33)
AREITMVRGDNYYGMDA

SEQ ID NO: 7871 - protein, 9 aa, Homo sapiens
  Light chain CDR3 for antibody 3936 (IGKV1D-17)
QQLNSYPYT

SEQ ID NO: 7872 - protein, 17 aa, Homo sapiens
  Heavy chain CDR3 for antibody 3936 (IGHV3-33)
AREITMVRVDNYYGMAV

SEQ ID NO: 7873 - protein, 8 aa, Homo sapiens
  Light chain CDR3 for antibody 3937 (IGKV3D-20)
QQYGSSWT

SEQ ID NO: 7874 - protein, 10 aa, Homo sapiens
  Heavy chain CDR3 for antibody 3937 (IGHV3-33)
ARESTDGMDV

SEQ ID NO: 7875 - protein, 9 aa, Homo sapiens
  Light chain CDR3 for antibody 3938 (IGKV1-6)
LQDYNYPYT

SEQ ID NO: 7876 - protein, 11 aa, Homo sapiens
  Heavy chain CDR3 for antibody 3938 (IGHV3-20)
ARDQGIAAADY

SEQ ID NO: 7877 - protein, 9 aa, Homo sapiens
  Light chain CDR3 for antibody 3939 (IGKV1-9)
QQFNSHPFT

SEQ ID NO: 7878 - protein, 16 aa, Homo sapiens
  Heavy chain CDR3 for antibody 3939 (IGHV1-18)
AREGDTMVRGVIAFDY

SEQ ID NO: 7879 - protein, 9 aa, Homo sapiens
  Light chain CDR3 for antibody 3940 (IGKV1-9)
QQLNGYPYT

SEQ ID NO: 7880 - protein, 15 aa, Homo sapiens
  Heavy chain CDR3 for antibody 3940 (IGHV1-46)
AGEKCDGSGSYPFDY

SEQ ID NO: 7881 - protein, 9 aa, Homo sapiens
  Light chain CDR3 for antibody 3941 (IGKV1D-17)
LQHNSYPYT

SEQ ID NO: 7882 - protein, 10 aa, Homo sapiens
  Heavy chain CDR3 for antibody 3941 (IGHV3-33)
AREAGAGFDY

SEQ ID NO: 7883 - protein, 9 aa, Homo sapiens
  Light chain CDR3 for antibody 3942 (IGKV1-17)
LQHNSYPRT

SEQ ID NO: 7884 - protein, 18 aa, Homo sapiens
  Heavy chain CDR3 for antibody 3942 (IGHV3-23)
AKEEEQQLVYYYYYGMDV

SEQ ID NO: 7885 - protein, 9 aa, Homo sapiens
  Light chain CDR3 for antibody 3943 (IGKV1-9)
QQLNSYPYT

SEQ ID NO: 7886 - protein, 15 aa, Homo sapiens
  Heavy chain CDR3 for antibody 3943 (IGHV1-46)
ARENFYGSGSYPFDY

SEQ ID NO: 7887 - protein, 9 aa, Homo sapiens
  Light chain CDR3 for antibody 3944 (IGKV1-6)
LQDYNYPYT

SEQ ID NO: 7888 - protein, 12 aa, Homo sapiens
  Heavy chain CDR3 for antibody 3944 (IGHV1-18)
ARDRAAAAPLGY

SEQ ID NO: 7889 - protein, 9 aa, Homo sapiens
  Light chain CDR3 for antibody 3945 (IGKV1-9)
QQLNSYPYT

SEQ ID NO: 7890 - protein, 15 aa, Homo sapiens
  Heavy chain CDR3 for antibody 3945 (IGHV1-46)
ARKKYYGSGNYPFDY

SEQ ID NO: 7891 - protein, 9 aa, Homo sapiens
  Light chain CDR3 for antibody 3946 (IGKV1-9)
QQLNSYPYT

SEQ ID NO: 7892 - protein, 15 aa, Homo sapiens
  Heavy chain CDR3 for antibody 3946 (IGHV1-46)
AREKVCGAGSYPFDY

SEQ ID NO: 7893 - protein, 9 aa, Homo sapiens
  Light chain CDR3 for antibody 3947 (IGKV1-9)
QQLNSYPYT

SEQ ID NO: 7894 - protein, 15 aa, Homo sapiens
  Heavy chain CDR3 for antibody 3947 (IGHV1-46)
ARDKYHGSGNYPFDY

SEQ ID NO: 7895 - protein, 8 aa, Homo sapiens
  Light chain CDR3 for antibody 3948 (IGKV3D-20)
QQYGSSWT

SEQ ID NO: 7896 - protein, 10 aa, Homo sapiens
  Heavy chain CDR3 for antibody 3948 (IGHV3-33)
ARESVAGFDY

SEQ ID NO: 7897 - protein, 9 aa, Homo sapiens
  Light chain CDR3 for antibody 3949 (IGKV3D-20)
QQYGSSPYT

SEQ ID NO: 7898 - protein, 15 aa, Homo sapiens
  Heavy chain CDR3 for antibody 3949 (IGHV1-46)
AREKYYGSGSYPFDY

SEQ ID NO: 7899 - protein, 9 aa, Homo sapiens
  Light chain CDR3 for antibody 3950 (IGKV1D-17)
LQHNSYPYT

SEQ ID NO: 7900 - protein, 14 aa, Homo sapiens
  Heavy chain CDR3 for antibody 3950 (IGHV3-33)
ARGARYFDYYGMDV

SEQ ID NO: 7901 - protein, 9 aa, Homo sapiens
  Light chain CDR3 for antibody 3951 (IGKV1-17)
LQHNSYPFT

SEQ ID NO: 7902 - protein, 7 aa, Homo sapiens
  Heavy chain CDR3 for antibody 3951 (IGHV3-33)
ARDPTDY

SEQ ID NO: 7903 - protein, 9 aa, Homo sapiens
  Light chain CDR3 for antibody 3952 (IGKV1D-17)
LQHNSYPWT

SEQ ID NO: 7904 - protein, 10 aa, Homo sapiens
  Heavy chain CDR3 for antibody 3952 (IGHV3-33)
ARESRSGVDY

SEQ ID NO: 7905 - protein, 9 aa, Homo sapiens
  Light chain CDR3 for antibody 3953 (IGKV1-9)
QHLNSHPFT

SEQ ID NO: 7906 - protein, 17 aa, Homo sapiens
  Heavy chain CDR3 for antibody 3953 (IGHV3-33)
ARESTRVRGDNYYGMDV

SEQ ID NO: 7907 - protein, 9 aa, Homo sapiens
  Light chain CDR3 for antibody 3954 (IGKV1-9)
QQLNSYPFT

SEQ ID NO: 7908 - protein, 17 aa, Homo sapiens
  Heavy chain CDR3 for antibody 3954 (IGHV3-33)
AREITMVRRDNYYGIDF

SEQ ID NO: 7909 - protein, 9 aa, Homo sapiens
  Light chain CDR3 for antibody 3955 (IGKV1-9)
QQLNSYPFT

SEQ ID NO: 7910 - protein, 17 aa, Homo sapiens
  Heavy chain CDR3 for antibody 3955 (IGHV3-33)
EREINRVRGENYYGMDV

SEQ ID NO: 7911 - protein, 9 aa, Homo sapiens
  Light chain CDR3 for antibody 3956 (IGKV1-9)
QQLNSYPFT

SEQ ID NO: 7912 - protein, 17 aa, Homo sapiens
  Heavy chain CDR3 for antibody 3956 (IGHV3-33)
EREITLVRGDNYYGIDV

SEQ ID NO: 7913 - protein, 9 aa, Homo sapiens
  Light chain CDR3 for antibody 3957 (IGKV1-9)
QQLNGYPYT

SEQ ID NO: 7914 - protein, 17 aa, Homo sapiens
  Heavy chain CDR3 for antibody 3957 (IGHV3-11)
AREITMVRGDNYYGFDY

SEQ ID NO: 7915 - protein, 9 aa, Homo sapiens
  Light chain CDR3 for antibody 3958 (IGKV1-9)
QQLNGFPYT

SEQ ID NO: 7916 - protein, 15 aa, Homo sapiens
  Heavy chain CDR3 for antibody 3958 (IGHV1-46)
AREKYQGSGSYAIDY

SEQ ID NO: 7917 - protein, 9 aa, Homo sapiens
  Light chain CDR3 for antibody 3959 (IGKV1-9)
QQLNSYPFT

SEQ ID NO: 7918 - protein, 16 aa, Homo sapiens
  Heavy chain CDR3 for antibody 3959 (IGHV3-33)
ARDRDIVATGEYYFDY

SEQ ID NO: 7919 - protein, 9 aa, Homo sapiens
  Light chain CDR3 for antibody 3960 (IGKV1D-17)
LQHNSYPYT

SEQ ID NO: 7920 - protein, 17 aa, Homo sapiens
  Heavy chain CDR3 for antibody 3960 (IGHV3-33)
VREISLVRGDNYYGLDV

SEQ ID NO: 7921 - protein, 9 aa, Homo sapiens
  Light chain CDR3 for antibody 3961 (IGKV1-9)
QQLNGYPYT

SEQ ID NO: 7922 - protein, 15 aa, Homo sapiens
  Heavy chain CDR3 for antibody 3961 (IGHV1-46)
AREKYYGSGSYAMDF

SEQ ID NO: 7923 - protein, 9 aa, Homo sapiens
  Light chain CDR3 for antibody 3962 (IGKV1-9)
QQFNSHPFT

SEQ ID NO: 7924 - protein, 17 aa, Homo sapiens
  Heavy chain CDR3 for antibody 3962 (IGHV3-33)
ARESNMCRGDNYYGLDV

SEQ ID NO: 7925 - protein, 9 aa, Homo sapiens
  Light chain CDR3 for antibody 3963 (IGKV1D-17)
LQHNSYPYT

SEQ ID NO: 7926 - protein, 13 aa, Homo sapiens
  Heavy chain CDR3 for antibody 3963 (IGHV1-18)
AREGGSFYVSFDY

SEQ ID NO: 7927 - protein, 9 aa, Homo sapiens
  Light chain CDR3 for antibody 3964 (IGKV1-9)
QQLNSYPFT

SEQ ID NO: 7928 - protein, 16 aa, Homo sapiens
  Heavy chain CDR3 for antibody 3964 (IGHV3-33)
ARFGYSYGYDYCGMDV

SEQ ID NO: 7929 - protein, 9 aa, Homo sapiens
  Light chain CDR3 for antibody 3965 (IGKV1-9)
QQLNSYPYT

SEQ ID NO: 7930 - protein, 13 aa, Homo sapiens
  Heavy chain CDR3 for antibody 3965 (IGHV1-46)
AREGGNYYVSFDH

SEQ ID NO: 7931 - protein, 9 aa, Homo sapiens
  Light chain CDR3 for antibody 3966 (IGKV1-9)
QQLNSYPFT

SEQ ID NO: 7932 - protein, 15 aa, Homo sapiens
  Heavy chain CDR3 for antibody 3966 (IGHV3-33)
AREITMVRGVIAFDY

SEQ ID NO: 7933 - protein, 9 aa, Homo sapiens
  Light chain CDR3 for antibody 3967 (IGKV1-9)
QQLNSYPYT

SEQ ID NO: 7934 - protein, 15 aa, Homo sapiens
  Heavy chain CDR3 for antibody 3967 (IGHV1-46)
AREKCYGSGSYAIDY

SEQ ID NO: 7935 - protein, 9 aa, Homo sapiens
  Light chain CDR3 for antibody 3968 (IGKV1-9)
QQLNSYPYT

SEQ ID NO: 7936 - protein, 15 aa, Homo sapiens
  Heavy chain CDR3 for antibody 3968 (IGHV1-46)
AREKYYGSGSYPIDD

SEQ ID NO: 7937 - protein, 9 aa, Homo sapiens
  Light chain CDR3 for antibody 3969 (IGKV1-9)
QQLNSYPYT

SEQ ID NO: 7938 - protein, 17 aa, Homo sapiens
  Heavy chain CDR3 for antibody 3969 (IGHV3-48)
AREITMVRGDTSYGLDV

SEQ ID NO: 7939 - protein, 9 aa, Homo sapiens
  Light chain CDR3 for antibody 3970 (IGKV1-9)
QHLNSHPFT

SEQ ID NO: 7940 - protein, 15 aa, Homo sapiens
  Heavy chain CDR3 for antibody 3970 (IGHV1-46)
AREKYYGSGSYPFDY

SEQ ID NO: 7941 - protein, 9 aa, Homo sapiens
  Light chain CDR3 for antibody 3971 (IGKV1D-17)
LQHNSYPYT

SEQ ID NO: 7942 - protein, 16 aa, Homo sapiens
  Heavy chain CDR3 for antibody 3971 (IGHV1-18)
AREGDTMVRGVIAFDY

SEQ ID NO: 7943 - protein, 9 aa, Homo sapiens
  Light chain CDR3 for antibody 3972 (IGKV1-6)
QQLNSYPYT

SEQ ID NO: 7944 - protein, 13 aa, Homo sapiens
  Heavy chain CDR3 for antibody 3972 (IGHV3-23)
ARDYCGGDYYLDP

SEQ ID NO: 7945 - protein, 9 aa, Homo sapiens
  Light chain CDR3 for antibody 3973 (IGKV1D-17)
LQHNSYPYT

SEQ ID NO: 7946 - protein, 10 aa, Homo sapiens
  Heavy chain CDR3 for antibody 3973 (IGHV3-33)
AREAVDGFDY

SEQ ID NO: 7947 - protein, 9 aa, Homo sapiens
  Light chain CDR3 for antibody 3974 (IGKV6-21)
HQSSILPYT

SEQ ID NO: 7948 - protein, 17 aa, Homo sapiens
  Heavy chain CDR3 for antibody 3974 (IGHV1-18)
AREGRITMVRGVIAFDY

SEQ ID NO: 7949 - protein, 9 aa, Homo sapiens
  Light chain CDR3 for antibody 3975 (IGKV1-9)
QQLNSYPYT

SEQ ID NO: 7950 - protein, 17 aa, Homo sapiens
  Heavy chain CDR3 for antibody 3975 (IGHV3-33)
AREITMVRGYNYYGFDV

SEQ ID NO: 7951 - protein, 9 aa, Homo sapiens
  Light chain CDR3 for antibody 3976 (IGKV1-9)
HQLISYPYT

SEQ ID NO: 7952 - protein, 15 aa, Homo sapiens
  Heavy chain CDR3 for antibody 3976 (IGHV1-46)
AREKYYGSGSSPFDY

SEQ ID NO: 7953 - protein, 9 aa, Homo sapiens
  Light chain CDR3 for antibody 3977 (IGKV1-9)
QQFNSYPFT

SEQ ID NO: 7954 - protein, 17 aa, Homo sapiens
  Heavy chain CDR3 for antibody 3977 (IGHV3-33)
AREITMRRGDNYDGLDV

SEQ ID NO: 7955 - protein, 9 aa, Homo sapiens
  Light chain CDR3 for antibody 3978 (IGKV1-9)
QQLNGYPLT

SEQ ID NO: 7956 - protein, 16 aa, Homo sapiens
  Heavy chain CDR3 for antibody 3978 (IGHV1-2)
AREGDTMVRGVIAFDY

SEQ ID NO: 7957 - protein, 9 aa, Homo sapiens
  Light chain CDR3 for antibody 3979 (IGKV1-9)
QQLNSYPYT

SEQ ID NO: 7958 - protein, 15 aa, Homo sapiens
  Heavy chain CDR3 for antibody 3979 (IGHV1-46)
AREKYYGAESYPIDY

SEQ ID NO: 7959 - protein, 9 aa, Homo sapiens
  Light chain CDR3 for antibody 3980 (IGKV1-9)
QQLNSYPFT

SEQ ID NO: 7960 - protein, 17 aa, Homo sapiens
  Heavy chain CDR3 for antibody 3980 (IGHV3-33)
ARESTMLRGENYYGLDV

SEQ ID NO: 7961 - protein, 9 aa, Homo sapiens
  Light chain CDR3 for antibody 3981 (IGKV1-27)
QKYNSAPPT

SEQ ID NO: 7962 - protein, 17 aa, Homo sapiens
  Heavy chain CDR3 for antibody 3981 (IGHV3-33)
ARDRYYGSGSYYIPSDY

SEQ ID NO: 7963 - protein, 9 aa, Homo sapiens
  Light chain CDR3 for antibody 3982 (IGKV1-9)
QQLNSYPYT

SEQ ID NO: 7964 - protein, 15 aa, Homo sapiens
  Heavy chain CDR3 for antibody 3982 (IGHV1-46)
AREKYYGSGNYAMDY

SEQ ID NO: 7965 - protein, 9 aa, Homo sapiens
  Light chain CDR3 for antibody 3983 (IGKV1-9)
QQLNGFPYT

SEQ ID NO: 7966 - protein, 15 aa, Homo sapiens
  Heavy chain CDR3 for antibody 3983 (IGHV1-46)
AREKDYGSGIYPFDY

SEQ ID NO: 7967 - protein, 9 aa, Homo sapiens
  Light chain CDR3 for antibody 3984 (IGKV1-9)
QQLNSYPYT

SEQ ID NO: 7968 - protein, 10 aa, Homo sapiens
  Heavy chain CDR3 for antibody 3984 (IGHV1-46)
ARESVSGFDY

SEQ ID NO: 7969 - protein, 9 aa, Homo sapiens
  Light chain CDR3 for antibody 3985 (IGKV1-9)
QQLNSYPLT

SEQ ID NO: 7970 - protein, 15 aa, Homo sapiens
  Heavy chain CDR3 for antibody 3985 (IGHV1-24)
ATAPIPMVRGVFFDY

SEQ ID NO: 7971 - protein, 9 aa, Homo sapiens
  Light chain CDR3 for antibody 3986 (IGKV1-9)
QQLISYPYT

SEQ ID NO: 7972 - protein, 15 aa, Homo sapiens
  Heavy chain CDR3 for antibody 3986 (IGHV1-46)
AREKYYVSGTYPFDS

SEQ ID NO: 7973 - protein, 9 aa, Homo sapiens
  Light chain CDR3 for antibody 3987 (IGKV1-9)
QQLDSHPFT

SEQ ID NO: 7974 - protein, 15 aa, Homo sapiens
  Heavy chain CDR3 for antibody 3987 (IGHV1-46)
AREKYYGSASYPFDY

SEQ ID NO: 7975 - protein, 9 aa, Homo sapiens
  Light chain CDR3 for antibody 3988 (IGKV1-8)
QQYYSYPRT

SEQ ID NO: 7976 - protein, 10 aa, Homo sapiens
  Heavy chain CDR3 for antibody 3988 (IGHV3-33)
AREGYSGYDY

SEQ ID NO: 7977 - protein, 9 aa, Homo sapiens
  Light chain CDR3 for antibody 3989 (IGKV1-17)
LQHNSYPLT

SEQ ID NO: 7978 - protein, 10 aa, Homo sapiens
  Heavy chain CDR3 for antibody 3989 (IGHV3-23)
AKGGLWFGEY

SEQ ID NO: 7979 - protein, 9 aa, Homo sapiens
  Light chain CDR3 for antibody 3990 (IGKV1-9)
QQLNSYPYT

SEQ ID NO: 7980 - protein, 15 aa, Homo sapiens
  Heavy chain CDR3 for antibody 3990 (IGHV1-46)
ARENYYSSESYPFDY

SEQ ID NO: 7981 - protein, 9 aa, Homo sapiens
  Light chain CDR3 for antibody 3991 (IGKV1-9)
QQLNGFPYT

SEQ ID NO: 7982 - protein, 15 aa, Homo sapiens
  Heavy chain CDR3 for antibody 3991 (IGHV1-46)
AREKYYGSGSYAFEY

SEQ ID NO: 7983 - protein, 9 aa, Homo sapiens
  Light chain CDR3 for antibody 3992 (IGKV1-5)
QQYNSYSRT

SEQ ID NO: 7984 - protein, 15 aa, Homo sapiens
  Heavy chain CDR3 for antibody 3992 (IGHV1-46)
AREKYYGSGSYPFDY

SEQ ID NO: 7985 - protein, 9 aa, Homo sapiens
  Light chain CDR3 for antibody 3993 (IGKV1-9)
QQLNSYPFT

SEQ ID NO: 7986 - protein, 17 aa, Homo sapiens
  Heavy chain CDR3 for antibody 3993 (IGHV3-33)
AREITMFRGDNYYGIDV

SEQ ID NO: 7987 - protein, 9 aa, Homo sapiens
  Light chain CDR3 for antibody 3994 (IGKV1-9)
QQFNSHPFT

SEQ ID NO: 7988 - protein, 17 aa, Homo sapiens
  Heavy chain CDR3 for antibody 3994 (IGHV3-23)
ERESTMYRGDNYYGLDV

SEQ ID NO: 7989 - protein, 9 aa, Homo sapiens
  Light chain CDR3 for antibody 3995 (IGKV1-9)
QQLNSYPLT

SEQ ID NO: 7990 - protein, 15 aa, Homo sapiens
  Heavy chain CDR3 for antibody 3995 (IGHV1-46)
AREKYYGSGTYPFDS

SEQ ID NO: 7991 - protein, 9 aa, Homo sapiens
  Light chain CDR3 for antibody 3996 (IGKV1-9)
QQLNSYPLT

SEQ ID NO: 7992 - protein, 15 aa, Homo sapiens
  Heavy chain CDR3 for antibody 3996 (IGHV1-46)
ARQKYYGSASYPFDY

SEQ ID NO: 7993 - protein, 9 aa, Homo sapiens
  Light chain CDR3 for antibody 3997 (IGKV1-9)
QQFNSHPFT

SEQ ID NO: 7994 - protein, 17 aa, Homo sapiens
  Heavy chain CDR3 for antibody 3997 (IGHV3-33)
AREITMVRGENYYGMDV

SEQ ID NO: 7995 - protein, 9 aa, Homo sapiens
  Light chain CDR3 for antibody 3998 (IGKV1-9)
QQLNSYPYT

SEQ ID NO: 7996 - protein, 15 aa, Homo sapiens
  Heavy chain CDR3 for antibody 3998 (IGHV1-46)
AREKSYGSGSYPIDY

SEQ ID NO: 7997 - protein, 9 aa, Homo sapiens
  Light chain CDR3 for antibody 3999 (IGKV1-9)
QQLNGFPYT

SEQ ID NO: 7998 - protein, 10 aa, Homo sapiens
  Heavy chain CDR3 for antibody 3999 (IGHV3-33)
AREGRTGFDY

SEQ ID NO: 7999 - protein, 8 aa, Homo sapiens
  Light chain CDR3 for antibody 4000 (IGKV3D-20)
QQYGSSWT

SEQ ID NO: 8000 - protein, 15 aa, Homo sapiens
  Heavy chain CDR3 for antibody 4000 (IGHV1-46)
AREKYYGSGSYPFDY

SEQ ID NO: 8001 - protein, 9 aa, Homo sapiens
  Light chain CDR3 for antibody 4001 (IGKV6-21)
HQSSSLPYT

SEQ ID NO: 8002 - protein, 16 aa, Homo sapiens
  Heavy chain CDR3 for antibody 4001 (IGHV1-18)
ATEGAVAGYYYYGMDV

SEQ ID NO: 8003 - protein, 9 aa, Homo sapiens
  Light chain CDR3 for antibody 4002 (IGKV1-5)
QQYNSYSRT

SEQ ID NO: 8004 - protein, 17 aa, Homo sapiens
  Heavy chain CDR3 for antibody 4002 (IGHV3-33)
AREITMVRGDNYYGMDV

SEQ ID NO: 8005 - protein, 9 aa, Homo sapiens
  Light chain CDR3 for antibody 4003 (IGKV1-9)
QQLNGFPYT

SEQ ID NO: 8006 - protein, 17 aa, Homo sapiens
  Heavy chain CDR3 for antibody 4003 (IGHV3-33)
AREITRLRGDNYYGLDV

SEQ ID NO: 8007 - protein, 9 aa, Homo sapiens
  Light chain CDR3 for antibody 4004 (IGKV1-9)
QQFNSYPFT

SEQ ID NO: 8008 - protein, 17 aa, Homo sapiens
  Heavy chain CDR3 for antibody 4004 (IGHV3-48)
AREITIVRGDKYYGIDV

SEQ ID NO: 8009 - protein, 9 aa, Homo sapiens
  Light chain CDR3 for antibody 4005 (IGKV1-9)
QQFNSHPFT

SEQ ID NO: 8010 - protein, 17 aa, Homo sapiens
  Heavy chain CDR3 for antibody 4005 (IGHV3-33)
ERESTMVRGDNYYGMDD

SEQ ID NO: 8011 - protein, 9 aa, Homo sapiens
  Light chain CDR3 for antibody 4006 (IGKV1D-17)
LQHNSYPYT

SEQ ID NO: 8012 - protein, 9 aa, Homo sapiens
  Heavy chain CDR3 for antibody 4006 (IGHV3-23)
AKEAVAGDY

SEQ ID NO: 8013 - protein, 9 aa, Homo sapiens
  Light chain CDR3 for antibody 4007 (IGKV3D-20)
QQYGSSPYT

SEQ ID NO: 8014 - protein, 17 aa, Homo sapiens
  Heavy chain CDR3 for antibody 4007 (IGHV3-33)
AREITMVRGDNYYGLDV

SEQ ID NO: 8015 - protein, 9 aa, Homo sapiens
  Light chain CDR3 for antibody 4008 (IGKV1-9)
QQLNSYPFT

SEQ ID NO: 8016 - protein, 17 aa, Homo sapiens
  Heavy chain CDR3 for antibody 4008 (IGHV3-33)
AREIPLARGDNYYGMDV

SEQ ID NO: 8017 - protein, 9 aa, Homo sapiens
  Light chain CDR3 for antibody 4009 (IGKV1-9)
HQLISYPYT

SEQ ID NO: 8018 - protein, 15 aa, Homo sapiens
  Heavy chain CDR3 for antibody 4009 (IGHV1-46)
AREGLTGYYPNWFDP

SEQ ID NO: 8019 - protein, 9 aa, Homo sapiens
  Light chain CDR3 for antibody 4010 (IGKV1-9)
QQFNSYPFT

SEQ ID NO: 8020 - protein, 17 aa, Homo sapiens
  Heavy chain CDR3 for antibody 4010 (IGHV3-33)
GRESTMGRGDNYYGMDV

SEQ ID NO: 8021 - protein, 9 aa, Homo sapiens
  Light chain CDR3 for antibody 4011 (IGKV1-17)
LQHNTYPRT

SEQ ID NO: 8022 - protein, 15 aa, Homo sapiens
  Heavy chain CDR3 for antibody 4011 (IGHV1-46)
AREKYYGSGSYPFDY

SEQ ID NO: 8023 - protein, 8 aa, Homo sapiens
  Light chain CDR3 for antibody 4012 (IGKV3D-20)
QQYGSSWT

SEQ ID NO: 8024 - protein, 17 aa, Homo sapiens
  Heavy chain CDR3 for antibody 4012 (IGHV3-33)
AREITMVRGDNYYGMDV

SEQ ID NO: 8025 - protein, 9 aa, Homo sapiens
  Light chain CDR3 for antibody 4013 (IGKV1-9)
QQLNSYPFT

SEQ ID NO: 8026 - protein, 17 aa, Homo sapiens
  Heavy chain CDR3 for antibody 4013 (IGHV3-33)
EREITRVRGDDYYGMDV

SEQ ID NO: 8027 - protein, 9 aa, Homo sapiens
  Light chain CDR3 for antibody 4014 (IGKV1-9)
QQLNGYPYT

SEQ ID NO: 8028 - protein, 15 aa, Homo sapiens
  Heavy chain CDR3 for antibody 4014 (IGHV1-46)
SREKYYVSATYPFDY

SEQ ID NO: 8029 - protein, 9 aa, Homo sapiens
  Light chain CDR3 for antibody 4015 (IGKV1D-8)
QQYYSFPRT

SEQ ID NO: 8030 - protein, 16 aa, Homo sapiens
  Heavy chain CDR3 for antibody 4015 (IGHV1-46)
AREGDTMVRGVIAFDY

SEQ ID NO: 8031 - protein, 9 aa, Homo sapiens
  Light chain CDR3 for antibody 4016 (IGKV1-9)
QQLNSYPYT

SEQ ID NO: 8032 - protein, 15 aa, Homo sapiens
  Heavy chain CDR3 for antibody 4016 (IGHV1-46)
AREKYDGAGTYPIDY

SEQ ID NO: 8033 - protein, 9 aa, Homo sapiens
  Light chain CDR3 for antibody 4017 (IGKV1-9)
HQLNIYPYT

SEQ ID NO: 8034 - protein, 15 aa, Homo sapiens
  Heavy chain CDR3 for antibody 4017 (IGHV1-46)
AREKYYGSGSYPFDD

SEQ ID NO: 8035 - protein, 9 aa, Homo sapiens
  Light chain CDR3 for antibody 4018 (IGKV1-27)
QKYNSAPFT

SEQ ID NO: 8036 - protein, 17 aa, Homo sapiens
  Heavy chain CDR3 for antibody 4018 (IGHV1-46)
AREITMVRGDNYYGMDV

SEQ ID NO: 8037 - protein, 9 aa, Homo sapiens
  Light chain CDR3 for antibody 4019 (IGKV1-9)
QQLNGYPYT

SEQ ID NO: 8038 - protein, 17 aa, Homo sapiens
  Heavy chain CDR3 for antibody 4019 (IGHV3-33)
AREITMVRGDNSYGMDA

SEQ ID NO: 8039 - protein, 9 aa, Homo sapiens
  Light chain CDR3 for antibody 4020 (IGKV3D-20)
QQYGSSPYT

SEQ ID NO: 8040 - protein, 10 aa, Homo sapiens
  Heavy chain CDR3 for antibody 4020 (IGHV3-33)
ARESVAGFDY

SEQ ID NO: 8041 - protein, 9 aa, Homo sapiens
  Light chain CDR3 for antibody 4021 (IGKV1-9)
QQFNSYPFT

SEQ ID NO: 8042 - protein, 17 aa, Homo sapiens
  Heavy chain CDR3 for antibody 4021 (IGHV3-64)
GREITMFRGDNYYGIDV

SEQ ID NO: 8043 - protein, 9 aa, Homo sapiens
  Light chain CDR3 for antibody 4022 (IGKV1-9)
QQLNSYPYT

SEQ ID NO: 8044 - protein, 17 aa, Homo sapiens
  Heavy chain CDR3 for antibody 4022 (IGHV3-33)
AGEITMVRGDNYDGMDV

SEQ ID NO: 8045 - protein, 9 aa, Homo sapiens
  Light chain CDR3 for antibody 4023 (IGKV1-9)
QQLNSYPYT

SEQ ID NO: 8046 - protein, 15 aa, Homo sapiens
  Heavy chain CDR3 for antibody 4023 (IGHV1-46)
AREKFSGSGTYPFDS

SEQ ID NO: 8047 - protein, 9 aa, Homo sapiens
  Light chain CDR3 for antibody 4024 (IGKV6-21)
HQSSSLPYT

SEQ ID NO: 8048 - protein, 13 aa, Homo sapiens
  Heavy chain CDR3 for antibody 4024 (IGHV1-18)
AREGGRYYVSFDY

SEQ ID NO: 8049 - protein, 9 aa, Homo sapiens
  Light chain CDR3 for antibody 4025 (IGKV1-17)
LQHNSYPRT

SEQ ID NO: 8050 - protein, 9 aa, Homo sapiens
  Heavy chain CDR3 for antibody 4025 (IGHV3-33)
ARDDGYFDY

SEQ ID NO: 8051 - protein, 9 aa, Homo sapiens
  Light chain CDR3 for antibody 4026 (IGKV1-9)
QQLNSYPYT

SEQ ID NO: 8052 - protein, 15 aa, Homo sapiens
  Heavy chain CDR3 for antibody 4026 (IGHV1-46)
AIDKYYGSGSYPFDY

SEQ ID NO: 8053 - protein, 9 aa, Homo sapiens
  Light chain CDR3 for antibody 4027 (IGKV1-9)
QQLNGFPYT

SEQ ID NO: 8054 - protein, 15 aa, Homo sapiens
  Heavy chain CDR3 for antibody 4027 (IGHV1-46)
AREKSYGSGSSPFDY

SEQ ID NO: 8055 - protein, 9 aa, Homo sapiens
  Light chain CDR3 for antibody 4028 (IGKV1-9)
QQLNSYPYT

SEQ ID NO: 8056 - protein, 17 aa, Homo sapiens
  Heavy chain CDR3 for antibody 4028 (IGHV3-33)
ARDLAYCGGDCYSPFDY

SEQ ID NO: 8057 - protein, 9 aa, Homo sapiens
  Light chain CDR3 for antibody 4029 (IGKV1-9)
QQLNSYPYT

SEQ ID NO: 8058 - protein, 6 aa, Homo sapiens
  Heavy chain CDR3 for antibody 4029 (IGHV3-33)
ASEIDY

SEQ ID NO: 8059 - protein, 9 aa, Homo sapiens
  Light chain CDR3 for antibody 4030 (IGKV1-9)
QQLNSYPYT

SEQ ID NO: 8060 - protein, 15 aa, Homo sapiens
  Heavy chain CDR3 for antibody 4030 (IGHV1-46)
AGEKYDGSGSYPFDY

SEQ ID NO: 8061 - protein, 9 aa, Homo sapiens
  Light chain CDR3 for antibody 4031 (IGKV1-9)
QQLNSYPFT

SEQ ID NO: 8062 - protein, 17 aa, Homo sapiens
  Heavy chain CDR3 for antibody 4031 (IGHV3-33)
AREITMVRGDNYYAIDV

SEQ ID NO: 8063 - protein, 9 aa, Homo sapiens
  Light chain CDR3 for antibody 4032 (IGKV1-9)
QQLNGFPYT

SEQ ID NO: 8064 - protein, 15 aa, Homo sapiens
  Heavy chain CDR3 for antibody 4032 (IGHV1-46)
ARENYYGSGSDPFDY

SEQ ID NO: 8065 - protein, 9 aa, Homo sapiens
  Light chain CDR3 for antibody 4033 (IGKV1-9)
QQLNSYPFT

SEQ ID NO: 8066 - protein, 17 aa, Homo sapiens
  Heavy chain CDR3 for antibody 4033 (IGHV3-33)
AREITMVRGDDYYGLDV

SEQ ID NO: 8067 - protein, 9 aa, Homo sapiens
  Light chain CDR3 for antibody 4034 (IGKV1-9)
QQLNSYPYT

SEQ ID NO: 8068 - protein, 13 aa, Homo sapiens
  Heavy chain CDR3 for antibody 4034 (IGHV3-33)
ARDYGSGDYYSDP

SEQ ID NO: 8069 - protein, 9 aa, Homo sapiens
  Light chain CDR3 for antibody 4035 (IGKV6-21)
HQSSSLPYT

SEQ ID NO: 8070 - protein, 13 aa, Homo sapiens
  Heavy chain CDR3 for antibody 4035 (IGHV1-18)
AREGGSDYVSLDY

SEQ ID NO: 8071 - protein, 9 aa, Homo sapiens
  Light chain CDR3 for antibody 4036 (IGKV1-9)
HQLNSYPYT

SEQ ID NO: 8072 - protein, 17 aa, Homo sapiens
  Heavy chain CDR3 for antibody 4036 (IGHV3-33)
GREITMVRGENYYGMDV

SEQ ID NO: 8073 - protein, 9 aa, Homo sapiens
  Light chain CDR3 for antibody 4037 (IGKV1-9)
QQLDSYPYT

SEQ ID NO: 8074 - protein, 17 aa, Homo sapiens
  Heavy chain CDR3 for antibody 4037 (IGHV3-33)
AREITMVRGDNHYGMDV

SEQ ID NO: 8075 - protein, 9 aa, Homo sapiens
  Light chain CDR3 for antibody 4038 (IGKV1-9)
QQLNGFPYT

SEQ ID NO: 8076 - protein, 15 aa, Homo sapiens
  Heavy chain CDR3 for antibody 4038 (IGHV1-46)
AREKYYGAGSYAFDY

SEQ ID NO: 8077 - protein, 9 aa, Homo sapiens
  Light chain CDR3 for antibody 4039 (IGKV1-9)
QQFNSHPFT

SEQ ID NO: 8078 - protein, 17 aa, Homo sapiens
  Heavy chain CDR3 for antibody 4039 (IGHV3-33)
AREISVLRGANSYGLDV

SEQ ID NO: 8079 - protein, 9 aa, Homo sapiens
  Light chain CDR3 for antibody 4040 (IGKV1-9)
QQLNSYPYT

SEQ ID NO: 8080 - protein, 15 aa, Homo sapiens
  Heavy chain CDR3 for antibody 4040 (IGHV1-46)
AREKYYGAGSYAIEY

SEQ ID NO: 8081 - protein, 9 aa, Homo sapiens
  Light chain CDR3 for antibody 4041 (IGKV1-9)
QQLISYPYT

SEQ ID NO: 8082 - protein, 15 aa, Homo sapiens
  Heavy chain CDR3 for antibody 4041 (IGHV1-46)
AREKYEGAGSYPIDY

SEQ ID NO: 8083 - protein, 9 aa, Homo sapiens
  Light chain CDR3 for antibody 4042 (IGKV1-13)
QQFNSHPFT

SEQ ID NO: 8084 - protein, 9 aa, Homo sapiens
  Heavy chain CDR3 for antibody 4042 (IGHV3-23)
AKDELGIDY

SEQ ID NO: 8085 - protein, 9 aa, Homo sapiens
  Light chain CDR3 for antibody 4043 (IGKV1-9)
QQLNSYPFT

SEQ ID NO: 8086 - protein, 17 aa, Homo sapiens
  Heavy chain CDR3 for antibody 4043 (IGHV3-33)
VREITMVRGDTYDGMDD

SEQ ID NO: 8087 - protein, 9 aa, Homo sapiens
  Light chain CDR3 for antibody 4044 (IGKV1-9)
QQLNGYPYT

SEQ ID NO: 8088 - protein, 16 aa, Homo sapiens
  Heavy chain CDR3 for antibody 4044 (IGHV1-46)
AREGDTMVRGVIAFES

SEQ ID NO: 8089 - protein, 9 aa, Homo sapiens
  Light chain CDR3 for antibody 4045 (IGKV1-9)
QQLNGYPYT

SEQ ID NO: 8090 - protein, 13 aa, Homo sapiens
  Heavy chain CDR3 for antibody 4045 (IGHV1-18)
AREGGSFYVSFDY

SEQ ID NO: 8091 - protein, 9 aa, Homo sapiens
  Light chain CDR3 for antibody 4046 (IGKV1-9)
QQLNSYPFT

SEQ ID NO: 8092 - protein, 17 aa, Homo sapiens
  Heavy chain CDR3 for antibody 4046 (IGHV3-33)
EREIAMVRGDYYYGMEV

SEQ ID NO: 8093 - protein, 9 aa, Homo sapiens
  Light chain CDR3 for antibody 4047 (IGKV1D-17)
LQHTSYPYT

SEQ ID NO: 8094 - protein, 15 aa, Homo sapiens
  Heavy chain CDR3 for antibody 4047 (IGHV1-46)
AREKYYGSGSYPFDY

SEQ ID NO: 8095 - protein, 9 aa, Homo sapiens
  Light chain CDR3 for antibody 4048 (IGKV1D-17)
LQHNSYPYT

SEQ ID NO: 8096 - protein, 16 aa, Homo sapiens
  Heavy chain CDR3 for antibody 4048 (IGHV3-33)
ARFGYSYGYDYCGMDV

SEQ ID NO: 8097 - protein, 9 aa, Homo sapiens
  Light chain CDR3 for antibody 4049 (IGKV1-9)
QQFNSHPFT

SEQ ID NO: 8098 - protein, 17 aa, Homo sapiens
  Heavy chain CDR3 for antibody 4049 (IGHV3-33)
AREIPMVRGDNYYGLDA

SEQ ID NO: 8099 - protein, 9 aa, Homo sapiens
  Light chain CDR3 for antibody 4050 (IGKV1-9)
QQLNSYPYT

SEQ ID NO: 8100 - protein, 15 aa, Homo sapiens
  Heavy chain CDR3 for antibody 4050 (IGHV1-46)
AIEKYYGAGSYPIDD

SEQ ID NO: 8101 - protein, 9 aa, Homo sapiens
  Light chain CDR3 for antibody 4051 (IGKV1-9)
QQLNSYPYT

SEQ ID NO: 8102 - protein, 13 aa, Homo sapiens
  Heavy chain CDR3 for antibody 4051 (IGHV3-30)
ARDYCGGDGYHDP

SEQ ID NO: 8103 - protein, 9 aa, Homo sapiens
  Light chain CDR3 for antibody 4052 (IGKV1-9)
QQFNSHPFT

SEQ ID NO: 8104 - protein, 17 aa, Homo sapiens
  Heavy chain CDR3 for antibody 4052 (IGHV3-33)
AREITMVRGDNYSGLDA

SEQ ID NO: 8105 - protein, 9 aa, Homo sapiens
  Light chain CDR3 for antibody 4053 (IGKV1D-17)
QQLNSYPYT

SEQ ID NO: 8106 - protein, 15 aa, Homo sapiens
  Heavy chain CDR3 for antibody 4053 (IGHV1-46)
ARQKYYGSAIYPFDY

SEQ ID NO: 8107 - protein, 9 aa, Homo sapiens
  Light chain CDR3 for antibody 4054 (IGKV6-21)
HQSSSLPYT

SEQ ID NO: 8108 - protein, 13 aa, Homo sapiens
  Heavy chain CDR3 for antibody 4054 (IGHV1-46)
ARGTGTTGASFDY

SEQ ID NO: 8109 - protein, 9 aa, Homo sapiens
  Light chain CDR3 for antibody 4055 (IGKV1D-17)
LQHNSYPYT

SEQ ID NO: 8110 - protein, 10 aa, Homo sapiens
  Heavy chain CDR3 for antibody 4055 (IGHV3-33)
AIEAVAAFDY

SEQ ID NO: 8111 - protein, 9 aa, Homo sapiens
  Light chain CDR3 for antibody 4056 (IGKV1-9)
QQLNGYPYT

SEQ ID NO: 8112 - protein, 15 aa, Homo sapiens
  Heavy chain CDR3 for antibody 4056 (IGHV1-46)
ARAKSYGSWCYPFDY

SEQ ID NO: 8113 - protein, 9 aa, Homo sapiens
  Light chain CDR3 for antibody 4057 (IGKV1-9)
QQLNSYPYT

SEQ ID NO: 8114 - protein, 10 aa, Homo sapiens
  Heavy chain CDR3 for antibody 4057 (IGHV3-33)
AREAVAGFDY

SEQ ID NO: 8115 - protein, 9 aa, Homo sapiens
  Light chain CDR3 for antibody 4058 (IGKV1-9)
QQLNSYPLT

SEQ ID NO: 8116 - protein, 15 aa, Homo sapiens
  Heavy chain CDR3 for antibody 4058 (IGHV1-46)
AREGLSGYDPNCFDS

SEQ ID NO: 8117 - protein, 9 aa, Homo sapiens
  Light chain CDR3 for antibody 4059 (IGKV1-9)
QQLNSYPLT

SEQ ID NO: 8118 - protein, 19 aa, Homo sapiens
  Heavy chain CDR3 for antibody 4059 (IGHV4-59)
ARDGRDILTGYNYYYGMDV

SEQ ID NO: 8119 - protein, 9 aa, Homo sapiens
  Light chain CDR3 for antibody 4060 (IGKV1-9)
QQLNGFPYT

SEQ ID NO: 8120 - protein, 15 aa, Homo sapiens
  Heavy chain CDR3 for antibody 4060 (IGHV1-46)
AIDKYYGSWSYPFDY

SEQ ID NO: 8121 - protein, 9 aa, Homo sapiens
  Light chain CDR3 for antibody 4061 (IGKV1-9)
HQLNSYPYT

SEQ ID NO: 8122 - protein, 15 aa, Homo sapiens
  Heavy chain CDR3 for antibody 4061 (IGHV1-46)
AREKYYGSGSYPLYY

SEQ ID NO: 8123 - protein, 9 aa, Homo sapiens
  Light chain CDR3 for antibody 4062 (IGKV1-9)
QQFNSYPFT

SEQ ID NO: 8124 - protein, 17 aa, Homo sapiens
  Heavy chain CDR3 for antibody 4062 (IGHV3-33)
AREITMVRGDNYYGMEA

SEQ ID NO: 8125 - protein, 9 aa, Homo sapiens
  Light chain CDR3 for antibody 4063 (IGKV1-9)
QQLNSYPFT

SEQ ID NO: 8126 - protein, 17 aa, Homo sapiens
  Heavy chain CDR3 for antibody 4063 (IGHV3-33)
AREIAMVRGDSYYGMDA

SEQ ID NO: 8127 - protein, 9 aa, Homo sapiens
  Light chain CDR3 for antibody 4064 (IGKV1D-17)
QQHNSYPYT

SEQ ID NO: 8128 - protein, 9 aa, Homo sapiens
  Heavy chain CDR3 for antibody 4064 (IGHV3-23)
AKDELGIDY

SEQ ID NO: 8129 - protein, 9 aa, Homo sapiens
  Light chain CDR3 for antibody 4065 (IGKV1-9)
QQLNSYPYT

SEQ ID NO: 8130 - protein, 15 aa, Homo sapiens
  Heavy chain CDR3 for antibody 4065 (IGHV1-46)
AREKYHGAGSYRFDY

SEQ ID NO: 8131 - protein, 9 aa, Homo sapiens
  Light chain CDR3 for antibody 4066 (IGKV5-2)
LQHDNFPWT

SEQ ID NO: 8132 - protein, 10 aa, Homo sapiens
  Heavy chain CDR3 for antibody 4066 (IGHV3-33)
ARESVAGFDY

SEQ ID NO: 8133 - protein, 9 aa, Homo sapiens
  Light chain CDR3 for antibody 4067 (IGKV1-9)
QQLNSYQFT

SEQ ID NO: 8134 - protein, 13 aa, Homo sapiens
  Heavy chain CDR3 for antibody 4067 (IGHV3-33)
ARDYCGGDCYPDP

SEQ ID NO: 8135 - protein, 9 aa, Homo sapiens
  Light chain CDR3 for antibody 4068 (IGKV1-9)
QQLDSYPFT

SEQ ID NO: 8136 - protein, 17 aa, Homo sapiens
  Heavy chain CDR3 for antibody 4068 (IGHV3-33)
AREIAIVRGDNYYGLDV

SEQ ID NO: 8137 - protein, 9 aa, Homo sapiens
  Light chain CDR3 for antibody 4069 (IGKV6-21)
HQSSSLPYT

SEQ ID NO: 8138 - protein, 16 aa, Homo sapiens
  Heavy chain CDR3 for antibody 4069 (IGHV1-18)
AREEDTMVRGVNAFDY

SEQ ID NO: 8139 - protein, 9 aa, Homo sapiens
  Light chain CDR3 for antibody 4070 (IGKV1-9)
HQLNSYPYT

SEQ ID NO: 8140 - protein, 15 aa, Homo sapiens
  Heavy chain CDR3 for antibody 4070 (IGHV1-46)
AREKCYGSESYPFAY

SEQ ID NO: 8141 - protein, 9 aa, Homo sapiens
  Light chain CDR3 for antibody 4071 (IGKV1-9)
QQLNSYPFT

SEQ ID NO: 8142 - protein, 17 aa, Homo sapiens
  Heavy chain CDR3 for antibody 4071 (IGHV3-33)
AREITRVRGYNYYAMDA

SEQ ID NO: 8143 - protein, 9 aa, Homo sapiens
  Light chain CDR3 for antibody 4072 (IGKV6-21)
HQSSSLPYT

SEQ ID NO: 8144 - protein, 13 aa, Homo sapiens
  Heavy chain CDR3 for antibody 4072 (IGHV1-18)
AREGGNYYVAFDY

SEQ ID NO: 8145 - protein, 9 aa, Homo sapiens
  Light chain CDR3 for antibody 4073 (IGKV3-11)
QQRSNWPRT

SEQ ID NO: 8146 - protein, 15 aa, Homo sapiens
  Heavy chain CDR3 for antibody 4073 (IGHV1-46)
AREKYYGSGSYPFDY

SEQ ID NO: 8147 - protein, 9 aa, Homo sapiens
  Light chain CDR3 for antibody 4074 (IGKV1-17)
LQHNSYPWT

SEQ ID NO: 8148 - protein, 14 aa, Homo sapiens
  Heavy chain CDR3 for antibody 4074 (IGHV3-23)
AKVLLWFGEHGMDV

SEQ ID NO: 8149 - protein, 9 aa, Homo sapiens
  Light chain CDR3 for antibody 4075 (IGKV1-9)
QQLNSYPLT

SEQ ID NO: 8150 - protein, 15 aa, Homo sapiens
  Heavy chain CDR3 for antibody 4075 (IGHV1-46)
AREKCHGSGSYPFDY

SEQ ID NO: 8151 - protein, 9 aa, Homo sapiens
  Light chain CDR3 for antibody 4076 (IGKV1-9)
QQLNGYPYT

SEQ ID NO: 8152 - protein, 15 aa, Homo sapiens
  Heavy chain CDR3 for antibody 4076 (IGHV1-46)
AREKDYGAGSYALDD

SEQ ID NO: 8153 - protein, 9 aa, Homo sapiens
  Light chain CDR3 for antibody 4077 (IGKV1-9)
QQLNSYPYT

SEQ ID NO: 8154 - protein, 13 aa, Homo sapiens
  Heavy chain CDR3 for antibody 4077 (IGHV3-11)
ARYYCRGDYYIDP

SEQ ID NO: 8155 - protein, 9 aa, Homo sapiens
  Light chain CDR3 for antibody 4078 (IGKV1-9)
QQLNSYPFT

SEQ ID NO: 8156 - protein, 12 aa, Homo sapiens
  Heavy chain CDR3 for antibody 4078 (IGHV3-20)
ARDWGDGDYFDY

SEQ ID NO: 8157 - protein, 9 aa, Homo sapiens
  Light chain CDR3 for antibody 4079 (IGKV1-9)
QQLNSYPFT

SEQ ID NO: 8158 - protein, 17 aa, Homo sapiens
  Heavy chain CDR3 for antibody 4079 (IGHV3-66)
ARESTMVRGESYYGMDV

SEQ ID NO: 8159 - protein, 9 aa, Homo sapiens
  Light chain CDR3 for antibody 4080 (IGKV1-9)
QQLNGFPYT

SEQ ID NO: 8160 - protein, 15 aa, Homo sapiens
  Heavy chain CDR3 for antibody 4080 (IGHV1-46)
AREKCQGSGSYPFDY

SEQ ID NO: 8161 - protein, 9 aa, Homo sapiens
  Light chain CDR3 for antibody 4081 (IGKV1-9)
QQLNGYPYP

SEQ ID NO: 8162 - protein, 15 aa, Homo sapiens
  Heavy chain CDR3 for antibody 4081 (IGHV1-46)
AREKYYGSDTYPFDY

SEQ ID NO: 8163 - protein, 9 aa, Homo sapiens
  Light chain CDR3 for antibody 4082 (IGKV1-9)
QQLNSYPYT

SEQ ID NO: 8164 - protein, 15 aa, Homo sapiens
  Heavy chain CDR3 for antibody 4082 (IGHV1-46)
AREKSYGSGRYPFDS

SEQ ID NO: 8165 - protein, 9 aa, Homo sapiens
  Light chain CDR3 for antibody 4083 (IGKV1-9)
QQLNGYPYT

SEQ ID NO: 8166 - protein, 15 aa, Homo sapiens
  Heavy chain CDR3 for antibody 4083 (IGHV1-46)
AREKDHGSGSYPFEY

SEQ ID NO: 8167 - protein, 9 aa, Homo sapiens
  Light chain CDR3 for antibody 4084 (IGKV1-9)
QQLNSYPFT

SEQ ID NO: 8168 - protein, 17 aa, Homo sapiens
  Heavy chain CDR3 for antibody 4084 (IGHV3-33)
AREITGIRGDNYYGMAV

SEQ ID NO: 8169 - protein, 9 aa, Homo sapiens
  Light chain CDR3 for antibody 4085 (IGKV1-9)
QQLNGYPYT

SEQ ID NO: 8170 - protein, 15 aa, Homo sapiens
  Heavy chain CDR3 for antibody 4085 (IGHV1-46)
AREKSYGPGSYPFDY

SEQ ID NO: 8171 - protein, 9 aa, Homo sapiens
  Light chain CDR3 for antibody 4086 (IGKV6-21)
HQSSSLPYT

SEQ ID NO: 8172 - protein, 13 aa, Homo sapiens
  Heavy chain CDR3 for antibody 4086 (IGHV1-18)
AREGGSFYVAFEY

SEQ ID NO: 8173 - protein, 9 aa, Homo sapiens
  Light chain CDR3 for antibody 4087 (IGKV1-9)
QQLNGYPYT

SEQ ID NO: 8174 - protein, 15 aa, Homo sapiens
  Heavy chain CDR3 for antibody 4087 (IGHV1-46)
AREKYYGSATSPFDS

SEQ ID NO: 8175 - protein, 9 aa, Homo sapiens
  Light chain CDR3 for antibody 4088 (IGKV1-9)
QQFNSYPFT

SEQ ID NO: 8176 - protein, 17 aa, Homo sapiens
  Heavy chain CDR3 for antibody 4088 (IGHV3-33)
AREITRVRGDNYDGMDV

SEQ ID NO: 8177 - protein, 9 aa, Homo sapiens
  Light chain CDR3 for antibody 4089 (IGKV1-9)
QQFNSFPFT

SEQ ID NO: 8178 - protein, 17 aa, Homo sapiens
  Heavy chain CDR3 for antibody 4089 (IGHV3-33)
AREIHLVRGANSYGLDV

SEQ ID NO: 8179 - protein, 9 aa, Homo sapiens
  Light chain CDR3 for antibody 4090 (IGKV1-9)
QQLNSYPYT

SEQ ID NO: 8180 - protein, 15 aa, Homo sapiens
  Heavy chain CDR3 for antibody 4090 (IGHV1-46)
AREKYYGSVTYPFEY

SEQ ID NO: 8181 - protein, 9 aa, Homo sapiens
  Light chain CDR3 for antibody 4091 (IGKV1-9)
QQLNSYPYT

SEQ ID NO: 8182 - protein, 17 aa, Homo sapiens
  Heavy chain CDR3 for antibody 4091 (IGHV3-33)
AREITRVRGEKYYGMDV

SEQ ID NO: 8183 - protein, 9 aa, Homo sapiens
  Light chain CDR3 for antibody 4092 (IGKV1-9)
QQFNSHPFT

SEQ ID NO: 8184 - protein, 17 aa, Homo sapiens
  Heavy chain CDR3 for antibody 4092 (IGHV3-33)
AREITMVRGDTYYGMDG

SEQ ID NO: 8185 - protein, 9 aa, Homo sapiens
  Light chain CDR3 for antibody 4093 (IGKV6-21)
HQSSSLPYT

SEQ ID NO: 8186 - protein, 13 aa, Homo sapiens
  Heavy chain CDR3 for antibody 4093 (IGHV1-18)
AKEVGSYIDSFDY

SEQ ID NO: 8187 - protein, 9 aa, Homo sapiens
  Light chain CDR3 for antibody 4094 (IGKV1-9)
QQLNGYPYT

SEQ ID NO: 8188 - protein, 15 aa, Homo sapiens
  Heavy chain CDR3 for antibody 4094 (IGHV1-46)
AREKYYVSATYPFDY

SEQ ID NO: 8189 - protein, 9 aa, Homo sapiens
  Light chain CDR3 for antibody 4095 (IGKV1D-17)
LQHNSYPYT

SEQ ID NO: 8190 - protein, 17 aa, Homo sapiens
  Heavy chain CDR3 for antibody 4095 (IGHV3-33)
AREITMIRGENYYGLDV

SEQ ID NO: 8191 - protein, 9 aa, Homo sapiens
  Light chain CDR3 for antibody 4096 (IGKV1D-17)
LQHNSYPFT

SEQ ID NO: 8192 - protein, 17 aa, Homo sapiens
  Heavy chain CDR3 for antibody 4096 (IGHV3-33)
AREITMFRGDNYYGLDV

SEQ ID NO: 8193 - protein, 9 aa, Homo sapiens
  Light chain CDR3 for antibody 4097 (IGKV1-9)
LQLNSYPYT

SEQ ID NO: 8194 - protein, 15 aa, Homo sapiens
  Heavy chain CDR3 for antibody 4097 (IGHV1-46)
ARENYYGSGSYPFDY

SEQ ID NO: 8195 - protein, 9 aa, Homo sapiens
  Light chain CDR3 for antibody 4098 (IGKV1D-17)
LQHNSYPYT

SEQ ID NO: 8196 - protein, 10 aa, Homo sapiens
  Heavy chain CDR3 for antibody 4098 (IGHV3-33)
AREYTDAIDV

SEQ ID NO: 8197 - protein, 9 aa, Homo sapiens
  Light chain CDR3 for antibody 4099 (IGKV1-9)
QQFNSYPFT

SEQ ID NO: 8198 - protein, 6 aa, Homo sapiens
  Heavy chain CDR3 for antibody 4099 (IGHV3-33)
AREIDY

SEQ ID NO: 8199 - protein, 9 aa, Homo sapiens
  Light chain CDR3 for antibody 4100 (IGKV1-17)
LQHNSYPWT

SEQ ID NO: 8200 - protein, 13 aa, Homo sapiens
  Heavy chain CDR3 for antibody 4100 (IGHV3-23)
AKGGTMVRDIGYY

SEQ ID NO: 8201 - protein, 9 aa, Homo sapiens
  Light chain CDR3 for antibody 4101 (IGKV1-9)
QQLNGYPYT

SEQ ID NO: 8202 - protein, 15 aa, Homo sapiens
  Heavy chain CDR3 for antibody 4101 (IGHV1-46)
AREKYYGAGSYPFES

SEQ ID NO: 8203 - protein, 9 aa, Homo sapiens
  Light chain CDR3 for antibody 4102 (IGKV1-9)
QQLNSYPLT

SEQ ID NO: 8204 - protein, 15 aa, Homo sapiens
  Heavy chain CDR3 for antibody 4102 (IGHV1-46)
AREKYYGSGSYPIDY

SEQ ID NO: 8205 - protein, 9 aa, Homo sapiens
  Light chain CDR3 for antibody 4103 (IGKV1-9)
QQLNSYPFT

SEQ ID NO: 8206 - protein, 10 aa, Homo sapiens
  Heavy chain CDR3 for antibody 4103 (IGHV3-33)
AREGVGGMDV

SEQ ID NO: 8207 - protein, 9 aa, Homo sapiens
  Light chain CDR3 for antibody 4104 (IGKV1-9)
QHLNSYPFT

SEQ ID NO: 8208 - protein, 17 aa, Homo sapiens
  Heavy chain CDR3 for antibody 4104 (IGHV3-33)
AREITMVRGDNYDGMDG

SEQ ID NO: 8209 - protein, 9 aa, Homo sapiens
  Light chain CDR3 for antibody 4105 (IGKV1-9)
QQFNSHPFT

SEQ ID NO: 8210 - protein, 17 aa, Homo sapiens
  Heavy chain CDR3 for antibody 4105 (IGHV3-33)
ARESTMVRGENYYGLDV

SEQ ID NO: 8211 - protein, 9 aa, Homo sapiens
  Light chain CDR3 for antibody 4106 (IGKV1-9)
QQLNGYPYT

SEQ ID NO: 8212 - protein, 15 aa, Homo sapiens
  Heavy chain CDR3 for antibody 4106 (IGHV1-46)
AREKYFGSGSYPFAY

SEQ ID NO: 8213 - protein, 9 aa, Homo sapiens
  Light chain CDR3 for antibody 4107 (IGKV1-6)
LQDYNYPWT

SEQ ID NO: 8214 - protein, 16 aa, Homo sapiens
  Heavy chain CDR3 for antibody 4107 (IGHV3-33)
ARDYEILTEAYYGMDV

SEQ ID NO: 8215 - protein, 9 aa, Homo sapiens
  Light chain CDR3 for antibody 4108 (IGKV1-9)
QQLNSYPYT

SEQ ID NO: 8216 - protein, 15 aa, Homo sapiens
  Heavy chain CDR3 for antibody 4108 (IGHV1-18)
AREKYHGSGSYAMDY

SEQ ID NO: 8217 - protein, 9 aa, Homo sapiens
  Light chain CDR3 for antibody 4109 (IGKV1-9)
QQLNSYPYT

SEQ ID NO: 8218 - protein, 17 aa, Homo sapiens
  Heavy chain CDR3 for antibody 4109 (IGHV3-33)
AREITRVRGANYYGLDG

SEQ ID NO: 8219 - protein, 9 aa, Homo sapiens
  Light chain CDR3 for antibody 4110 (IGKV1-8)
QQLNSYPYT

SEQ ID NO: 8220 - protein, 16 aa, Homo sapiens
  Heavy chain CDR3 for antibody 4110 (IGHV1-46)
ARGYVVVPAAVDAFDI

SEQ ID NO: 8221 - protein, 9 aa, Homo sapiens
  Light chain CDR3 for antibody 4111 (IGKV1-9)
QQLNGYPYT

SEQ ID NO: 8222 - protein, 15 aa, Homo sapiens
  Heavy chain CDR3 for antibody 4111 (IGHV1-46)
AREKYYGSGRYPLDY

SEQ ID NO: 8223 - protein, 9 aa, Homo sapiens
  Light chain CDR3 for antibody 4112 (IGKV1D-17)
LQHNSYPYT

SEQ ID NO: 8224 - protein, 17 aa, Homo sapiens
  Heavy chain CDR3 for antibody 4112 (IGHV3-20)
ARDYYGSGSYYNDAFAI

SEQ ID NO: 8225 - protein, 9 aa, Homo sapiens
  Light chain CDR3 for antibody 4113 (IGKV1-9)
QQLNSYPFT

SEQ ID NO: 8226 - protein, 15 aa, Homo sapiens
  Heavy chain CDR3 for antibody 4113 (IGHV1-46)
AREKSYGSGSYPFDD

SEQ ID NO: 8227 - protein, 9 aa, Homo sapiens
  Light chain CDR3 for antibody 4114 (IGKV1D-17)
LQHNSYPYT

SEQ ID NO: 8228 - protein, 10 aa, Homo sapiens
  Heavy chain CDR3 for antibody 4114 (IGHV3-33)
ARETVSGIDY

SEQ ID NO: 8229 - protein, 9 aa, Homo sapiens
  Light chain CDR3 for antibody 4115 (IGKV1-9)
QQLNSYPYT

SEQ ID NO: 8230 - protein, 17 aa, Homo sapiens
  Heavy chain CDR3 for antibody 4115 (IGHV3-33)
AREITIVRGANYYGMDV

SEQ ID NO: 8231 - protein, 9 aa, Homo sapiens
  Light chain CDR3 for antibody 4116 (IGKV1-9)
QQLNSYPYT

SEQ ID NO: 8232 - protein, 15 aa, Homo sapiens
  Heavy chain CDR3 for antibody 4116 (IGHV1-46)
AREKYYGAGRYPFDY

SEQ ID NO: 8233 - protein, 9 aa, Homo sapiens
  Light chain CDR3 for antibody 4117 (IGKV1-9)
QQLISYPYT

SEQ ID NO: 8234 - protein, 15 aa, Homo sapiens
  Heavy chain CDR3 for antibody 4117 (IGHV1-46)
AREKNYGAGSYPIDY

SEQ ID NO: 8235 - protein, 9 aa, Homo sapiens
  Light chain CDR3 for antibody 4118 (IGKV1-9)
QQFNSHPLT

SEQ ID NO: 8236 - protein, 17 aa, Homo sapiens
  Heavy chain CDR3 for antibody 4118 (IGHV3-33)
ARESTRVRGDNYYGLDV

SEQ ID NO: 8237 - protein, 9 aa, Homo sapiens
  Light chain CDR3 for antibody 4119 (IGKV1D-17)
LQHNSYPYT

SEQ ID NO: 8238 - protein, 15 aa, Homo sapiens
  Heavy chain CDR3 for antibody 4119 (IGHV1-46)
AREKYYGAGSYPFDC

SEQ ID NO: 8239 - protein, 9 aa, Homo sapiens
  Light chain CDR3 for antibody 4120 (IGKV1-9)
QQLNSYPYT

SEQ ID NO: 8240 - protein, 15 aa, Homo sapiens
  Heavy chain CDR3 for antibody 4120 (IGHV1-46)
AREKFPGSESYPFDY

SEQ ID NO: 8241 - protein, 9 aa, Homo sapiens
  Light chain CDR3 for antibody 4121 (IGKV6-21)
HQSSSLPYT

SEQ ID NO: 8242 - protein, 14 aa, Homo sapiens
  Heavy chain CDR3 for antibody 4121 (IGHV1-18)
AREGYSGYLVSIEY

SEQ ID NO: 8243 - protein, 9 aa, Homo sapiens
  Light chain CDR3 for antibody 4122 (IGKV1-9)
QQLNSYPFT

SEQ ID NO: 8244 - protein, 17 aa, Homo sapiens
  Heavy chain CDR3 for antibody 4122 (IGHV3-33)
AREIAMGRGENYYGMDA

SEQ ID NO: 8245 - protein, 9 aa, Homo sapiens
  Light chain CDR3 for antibody 4123 (IGKV1-9)
QQLNSYPYT

SEQ ID NO: 8246 - protein, 16 aa, Homo sapiens
  Heavy chain CDR3 for antibody 4123 (IGHV3-33)
ARIAAAGYYYYYGMDV

SEQ ID NO: 8247 - protein, 9 aa, Homo sapiens
  Light chain CDR3 for antibody 4124 (IGKV1-9)
QQFNSYPFT

SEQ ID NO: 8248 - protein, 17 aa, Homo sapiens
  Heavy chain CDR3 for antibody 4124 (IGHV3-33)
AREVTMVGGDNYYGLDV

SEQ ID NO: 8249 - protein, 9 aa, Homo sapiens
  Light chain CDR3 for antibody 4125 (IGKV1-9)
QQLNSYPYT

SEQ ID NO: 8250 - protein, 17 aa, Homo sapiens
  Heavy chain CDR3 for antibody 4125 (IGHV3-33)
AREITMVWGDNYYCMDV

SEQ ID NO: 8251 - protein, 9 aa, Homo sapiens
  Light chain CDR3 for antibody 4126 (IGKV1-9)
QQFNSHPFT

SEQ ID NO: 8252 - protein, 17 aa, Homo sapiens
  Heavy chain CDR3 for antibody 4126 (IGHV3-33)
AREMTMGPGDNYYGMDV

SEQ ID NO: 8253 - protein, 9 aa, Homo sapiens
  Light chain CDR3 for antibody 4127 (IGKV1-9)
QQLNSYPYT

SEQ ID NO: 8254 - protein, 15 aa, Homo sapiens
  Heavy chain CDR3 for antibody 4127 (IGHV1-46)
AREKSYVSASYPIAY

SEQ ID NO: 8255 - protein, 9 aa, Homo sapiens
  Light chain CDR3 for antibody 4128 (IGKV1D-17)
LQHNSYPYT

SEQ ID NO: 8256 - protein, 11 aa, Homo sapiens
  Heavy chain CDR3 for antibody 4128 (IGHV3-33)
AREWQWLATDY

SEQ ID NO: 8257 - protein, 10 aa, Homo sapiens
  Light chain CDR3 for antibody 4129 (IGKV3D-20)
QQYGSSLTWT

SEQ ID NO: 8258 - protein, 17 aa, Homo sapiens
  Heavy chain CDR3 for antibody 4129 (IGHV3-33)
AREITMLRGDNYYGLDV

SEQ ID NO: 8259 - protein, 9 aa, Homo sapiens
  Light chain CDR3 for antibody 4130 (IGKV1-9)
QQLNSYPYT

SEQ ID NO: 8260 - protein, 15 aa, Homo sapiens
  Heavy chain CDR3 for antibody 4130 (IGHV1-46)
AGEKYYGAGSYPLDS

SEQ ID NO: 8261 - protein, 10 aa, Homo sapiens
  Light chain CDR3 for antibody 4131 (IGKV3D-20)
QQYGSSLTWT

SEQ ID NO: 8262 - protein, 15 aa, Homo sapiens
  Heavy chain CDR3 for antibody 4131 (IGHV1-46)
AREKYYGSGSYPFDY

SEQ ID NO: 8263 - protein, 9 aa, Homo sapiens
  Light chain CDR3 for antibody 4132 (IGKV1-9)
QQFNSYPFT

SEQ ID NO: 8264 - protein, 17 aa, Homo sapiens
  Heavy chain CDR3 for antibody 4132 (IGHV3-33)
EREITMIRSDNYYCMDV

SEQ ID NO: 8265 - protein, 9 aa, Homo sapiens
  Light chain CDR3 for antibody 4133 (IGKV1-9)
QQLNSYPYT

SEQ ID NO: 8266 - protein, 15 aa, Homo sapiens
  Heavy chain CDR3 for antibody 4133 (IGHV1-46)
AREKFYGSAPYPFDY

SEQ ID NO: 8267 - protein, 9 aa, Homo sapiens
  Light chain CDR3 for antibody 4134 (IGKV1-9)
QQFNSHPFT

SEQ ID NO: 8268 - protein, 17 aa, Homo sapiens
  Heavy chain CDR3 for antibody 4134 (IGHV3-33)
ARESTMVRGDNYYGMEV

SEQ ID NO: 8269 - protein, 9 aa, Homo sapiens
  Light chain CDR3 for antibody 4135 (IGKV1-9)
QQFNSYPFT

SEQ ID NO: 8270 - protein, 17 aa, Homo sapiens
  Heavy chain CDR3 for antibody 4135 (IGHV3-33)
AREITMVRVYNYYGIDV

SEQ ID NO: 8271 - protein, 9 aa, Homo sapiens
  Light chain CDR3 for antibody 4136 (IGKV1-9)
HQLNSYPYT

SEQ ID NO: 8272 - protein, 15 aa, Homo sapiens
  Heavy chain CDR3 for antibody 4136 (IGHV1-46)
AREKYCGSGSYPFDY

SEQ ID NO: 8273 - protein, 9 aa, Homo sapiens
  Light chain CDR3 for antibody 4137 (IGKV1D-17)
LQHNSYPYT

SEQ ID NO: 8274 - protein, 10 aa, Homo sapiens
  Heavy chain CDR3 for antibody 4137 (IGHV3-64)
PRETLAAFDY

SEQ ID NO: 8275 - protein, 9 aa, Homo sapiens
  Light chain CDR3 for antibody 4138 (IGKV1D-17)
LQHNSYPYT

SEQ ID NO: 8276 - protein, 10 aa, Homo sapiens
  Heavy chain CDR3 for antibody 4138 (IGHV3-64)
SRESISGFDY

SEQ ID NO: 8277 - protein, 9 aa, Homo sapiens
  Light chain CDR3 for antibody 4139 (IGKV1-9)
QQLNSYPFT

SEQ ID NO: 8278 - protein, 17 aa, Homo sapiens
  Heavy chain CDR3 for antibody 4139 (IGHV3-33)
ARDITLFRGDNYYGMDV

SEQ ID NO: 8279 - protein, 9 aa, Homo sapiens
  Light chain CDR3 for antibody 4140 (IGKV1-9)
QQLNGYPYT

SEQ ID NO: 8280 - protein, 15 aa, Homo sapiens
  Heavy chain CDR3 for antibody 4140 (IGHV1-46)
AREKYYGSGSDPFGY

SEQ ID NO: 8281 - protein, 9 aa, Homo sapiens
  Light chain CDR3 for antibody 4141 (IGKV1-9)
QQHNSYPYT

SEQ ID NO: 8282 - protein, 13 aa, Homo sapiens
  Heavy chain CDR3 for antibody 4141 (IGHV3-13)
ARGGWELFDAFDI

SEQ ID NO: 8283 - protein, 9 aa, Homo sapiens
  Light chain CDR3 for antibody 4142 (IGKV1-9)
HQLNSYPYT

SEQ ID NO: 8284 - protein, 15 aa, Homo sapiens
  Heavy chain CDR3 for antibody 4142 (IGHV1-46)
AREKYFGPGSYPFEY

SEQ ID NO: 8285 - protein, 9 aa, Homo sapiens
  Light chain CDR3 for antibody 4143 (IGKV1-9)
HQLNSYPYT

SEQ ID NO: 8286 - protein, 15 aa, Homo sapiens
  Heavy chain CDR3 for antibody 4143 (IGHV1-46)
AREKYYGSGSYAFDY

SEQ ID NO: 8287 - protein, 9 aa, Homo sapiens
  Light chain CDR3 for antibody 4144 (IGKV6-21)
HQSSSLPYT

SEQ ID NO: 8288 - protein, 13 aa, Homo sapiens
  Heavy chain CDR3 for antibody 4144 (IGHV1-18)
AREGGSCYVSFDY

SEQ ID NO: 8289 - protein, 9 aa, Homo sapiens
  Light chain CDR3 for antibody 4145 (IGKV1-9)
QQLNGYPYT

SEQ ID NO: 8290 - protein, 17 aa, Homo sapiens
  Heavy chain CDR3 for antibody 4145 (IGHV3-11)
AREITMVRGDNYYGIEA

SEQ ID NO: 8291 - protein, 9 aa, Homo sapiens
  Light chain CDR3 for antibody 4146 (IGKV1-9)
QQLNSYPYT

SEQ ID NO: 8292 - protein, 15 aa, Homo sapiens
  Heavy chain CDR3 for antibody 4146 (IGHV1-46)
AIQKYYGSKTYPFDY

SEQ ID NO: 8293 - protein, 9 aa, Homo sapiens
  Light chain CDR3 for antibody 4147 (IGKV1-9)
QQFNSHPFT

SEQ ID NO: 8294 - protein, 17 aa, Homo sapiens
  Heavy chain CDR3 for antibody 4147 (IGHV3-33)
AREITMIRGDNYYGFDV

SEQ ID NO: 8295 - protein, 9 aa, Homo sapiens
  Light chain CDR3 for antibody 4148 (IGKV1-9)
QQLNSYPYT

SEQ ID NO: 8296 - protein, 15 aa, Homo sapiens
  Heavy chain CDR3 for antibody 4148 (IGHV1-46)
AREKYYGSESYRFDY

SEQ ID NO: 8297 - protein, 9 aa, Homo sapiens
  Light chain CDR3 for antibody 4149 (IGKV1-9)
QQLNSYPYT

SEQ ID NO: 8298 - protein, 18 aa, Homo sapiens
  Heavy chain CDR3 for antibody 4149 (IGHV1-46)
VRERNTMVRGDNYYGMDV

SEQ ID NO: 8299 - protein, 9 aa, Homo sapiens
  Light chain CDR3 for antibody 4150 (IGKV1-9)
QQLNSYPYT

SEQ ID NO: 8300 - protein, 15 aa, Homo sapiens
  Heavy chain CDR3 for antibody 4150 (IGHV1-18)
AREKCYGAGIYAFDY

SEQ ID NO: 8301 - protein, 9 aa, Homo sapiens
  Light chain CDR3 for antibody 4151 (IGKV1-9)
QQLNSYPFT

SEQ ID NO: 8302 - protein, 17 aa, Homo sapiens
  Heavy chain CDR3 for antibody 4151 (IGHV3-33)
VREITMGRGENYYGMDV

SEQ ID NO: 8303 - protein, 9 aa, Homo sapiens
  Light chain CDR3 for antibody 4152 (IGKV1D-17)
LQHNSYPYT

SEQ ID NO: 8304 - protein, 10 aa, Homo sapiens
  Heavy chain CDR3 for antibody 4152 (IGHV3-33)
ARDSTDGIDY

SEQ ID NO: 8305 - protein, 9 aa, Homo sapiens
  Light chain CDR3 for antibody 4153 (IGKV1-9)
QQLNSYPYT

SEQ ID NO: 8306 - protein, 15 aa, Homo sapiens
  Heavy chain CDR3 for antibody 4153 (IGHV1-69)
AREKCYGSGNYPFDQ

SEQ ID NO: 8307 - protein, 9 aa, Homo sapiens
  Light chain CDR3 for antibody 4154 (IGKV1-9)
QQLNGYPYT

SEQ ID NO: 8308 - protein, 15 aa, Homo sapiens
  Heavy chain CDR3 for antibody 4154 (IGHV1-46)
AIEKYYGSATYPFDY

SEQ ID NO: 8309 - protein, 9 aa, Homo sapiens
  Light chain CDR3 for antibody 4155 (IGKV1D-17)
LQHSSYPYT

SEQ ID NO: 8310 - protein, 10 aa, Homo sapiens
  Heavy chain CDR3 for antibody 4155 (IGHV3-33)
ARAATDGIDV

SEQ ID NO: 8311 - protein, 9 aa, Homo sapiens
  Light chain CDR3 for antibody 4156 (IGKV1-9)
QQLNSYPFT

SEQ ID NO: 8312 - protein, 17 aa, Homo sapiens
  Heavy chain CDR3 for antibody 4156 (IGHV3-33)
AREIAMDRGGNYYGIDF

SEQ ID NO: 8313 - protein, 9 aa, Homo sapiens
  Light chain CDR3 for antibody 4157 (IGKV6-21)
HQSSSLPYT

SEQ ID NO: 8314 - protein, 17 aa, Homo sapiens
  Heavy chain CDR3 for antibody 4157 (IGHV3-33)
AREITMLRGDNYYGLDV

SEQ ID NO: 8315 - protein, 9 aa, Homo sapiens
  Light chain CDR3 for antibody 4158 (IGKV1-9)
QQLNSYPYT

SEQ ID NO: 8316 - protein, 13 aa, Homo sapiens
  Heavy chain CDR3 for antibody 4158 (IGHV3-33)
ARDYCGGDCCTDA

SEQ ID NO: 8317 - protein, 9 aa, Homo sapiens
  Light chain CDR3 for antibody 4159 (IGKV1-9)
QQLNSYPFT

SEQ ID NO: 8318 - protein, 17 aa, Homo sapiens
  Heavy chain CDR3 for antibody 4159 (IGHV3-33)
AREMAMVRGDNYYGMDF

SEQ ID NO: 8319 - protein, 9 aa, Homo sapiens
  Light chain CDR3 for antibody 4160 (IGKV1-9)
QQLNSYPYT

SEQ ID NO: 8320 - protein, 15 aa, Homo sapiens
  Heavy chain CDR3 for antibody 4160 (IGHV1-46)
AREKYYVSASYPFHY

SEQ ID NO: 8321 - protein, 9 aa, Homo sapiens
  Light chain CDR3 for antibody 4161 (IGKV1-9)
QQFNSYPFT

SEQ ID NO: 8322 - protein, 17 aa, Homo sapiens
  Heavy chain CDR3 for antibody 4161 (IGHV3-66)
AREITMFRGDTYYGMDV

SEQ ID NO: 8323 - protein, 9 aa, Homo sapiens
  Light chain CDR3 for antibody 4162 (IGKV1-9)
QQLNSYPYT

SEQ ID NO: 8324 - protein, 15 aa, Homo sapiens
  Heavy chain CDR3 for antibody 4162 (IGHV1-46)
ARAKYYGSGSYPFES

SEQ ID NO: 8325 - protein, 9 aa, Homo sapiens
  Light chain CDR3 for antibody 4163 (IGKV1D-17)
LQHNSYPYT

SEQ ID NO: 8326 - protein, 17 aa, Homo sapiens
  Heavy chain CDR3 for antibody 4163 (IGHV3-33)
AREITMRRGDNCYGLDV

SEQ ID NO: 8327 - protein, 9 aa, Homo sapiens
  Light chain CDR3 for antibody 4164 (IGKV1-6)
LQDYNYPWT

SEQ ID NO: 8328 - protein, 15 aa, Homo sapiens
  Heavy chain CDR3 for antibody 4164 (IGHV1-46)
ARDIVVVPAAMGMDV

SEQ ID NO: 8329 - protein, 9 aa, Homo sapiens
  Light chain CDR3 for antibody 4165 (IGKV1-9)
QQLNSYPFT

SEQ ID NO: 8330 - protein, 17 aa, Homo sapiens
  Heavy chain CDR3 for antibody 4165 (IGHV3-33)
AREITLVRGDNYDGLDV

SEQ ID NO: 8331 - protein, 9 aa, Homo sapiens
  Light chain CDR3 for antibody 4166 (IGKV6-21)
HQSSSLPYT

SEQ ID NO: 8332 - protein, 10 aa, Homo sapiens
  Heavy chain CDR3 for antibody 4166 (IGHV3-33)
AREGRTGFDY

SEQ ID NO: 8333 - protein, 9 aa, Homo sapiens
  Light chain CDR3 for antibody 4167 (IGKV1-9)
QQFNSYPFT

SEQ ID NO: 8334 - protein, 15 aa, Homo sapiens
  Heavy chain CDR3 for antibody 4167 (IGHV1-46)
AREKYHGSGSYPFYY

SEQ ID NO: 8335 - protein, 9 aa, Homo sapiens
  Light chain CDR3 for antibody 4168 (IGKV1D-17)
LQHNSYPYT

SEQ ID NO: 8336 - protein, 10 aa, Homo sapiens
  Heavy chain CDR3 for antibody 4168 (IGHV3-33)
ARETYDGFDY

SEQ ID NO: 8337 - protein, 9 aa, Homo sapiens
  Light chain CDR3 for antibody 4169 (IGKV1-9)
QQLNSYPFT

SEQ ID NO: 8338 - protein, 17 aa, Homo sapiens
  Heavy chain CDR3 for antibody 4169 (IGHV3-33)
AKEITMIRGDNYYAIDV

SEQ ID NO: 8339 - protein, 9 aa, Homo sapiens
  Light chain CDR3 for antibody 4170 (IGKV1D-17)
LQHNSYPYT

SEQ ID NO: 8340 - protein, 13 aa, Homo sapiens
  Heavy chain CDR3 for antibody 4170 (IGHV3-11)
ARTGILTGYPFDY

SEQ ID NO: 8341 - protein, 9 aa, Homo sapiens
  Light chain CDR3 for antibody 4171 (IGKV1-9)
PPLNSYPYT

SEQ ID NO: 8342 - protein, 15 aa, Homo sapiens
  Heavy chain CDR3 for antibody 4171 (IGHV1-46)
AREKYYGSGSYPFDY

SEQ ID NO: 8343 - protein, 8 aa, Homo sapiens
  Light chain CDR3 for antibody 4172 (IGKV1D-13)
QQFNNYPT

SEQ ID NO: 8344 - protein, 15 aa, Homo sapiens
  Heavy chain CDR3 for antibody 4172 (IGHV3-33)
ARKGYSSGWYGPADV

SEQ ID NO: 8345 - protein, 9 aa, Homo sapiens
  Light chain CDR3 for antibody 4173 (IGKV1-9)
QQLNSYPYT

SEQ ID NO: 8346 - protein, 15 aa, Homo sapiens
  Heavy chain CDR3 for antibody 4173 (IGHV1-46)
AREKYYGSWSYPFDF

SEQ ID NO: 8347 - protein, 9 aa, Homo sapiens
  Light chain CDR3 for antibody 4174 (IGKV1-9)
QQLNSYPFT

SEQ ID NO: 8348 - protein, 17 aa, Homo sapiens
  Heavy chain CDR3 for antibody 4174 (IGHV3-48)
AREITRVRGANSYGMDF

SEQ ID NO: 8349 - protein, 9 aa, Homo sapiens
  Light chain CDR3 for antibody 4175 (IGKV1D-17)
QQLNSYPYT

SEQ ID NO: 8350 - protein, 15 aa, Homo sapiens
  Heavy chain CDR3 for antibody 4175 (IGHV1-46)
EREKYCGSESYPFDY

SEQ ID NO: 8351 - protein, 9 aa, Homo sapiens
  Light chain CDR3 for antibody 4176 (IGKV1-9)
QQLNSYPFT

SEQ ID NO: 8352 - protein, 17 aa, Homo sapiens
  Heavy chain CDR3 for antibody 4176 (IGHV3-33)
AREITMFRGDNYYGMDF

SEQ ID NO: 8353 - protein, 9 aa, Homo sapiens
  Light chain CDR3 for antibody 4177 (IGKV1-9)
QQLNSYPFT

SEQ ID NO: 8354 - protein, 9 aa, Homo sapiens
  Heavy chain CDR3 for antibody 4177 (IGHV3-33)
ARDDGYFDY

SEQ ID NO: 8355 - protein, 9 aa, Homo sapiens
  Light chain CDR3 for antibody 4178 (IGKV1-9)
QQLNSYPYT

SEQ ID NO: 8356 - protein, 15 aa, Homo sapiens
  Heavy chain CDR3 for antibody 4178 (IGHV1-46)
AREKYHGSGTYAFDY

SEQ ID NO: 8357 - protein, 9 aa, Homo sapiens
  Light chain CDR3 for antibody 4179 (IGKV1-9)
QQLNSYPFT

SEQ ID NO: 8358 - protein, 13 aa, Homo sapiens
  Heavy chain CDR3 for antibody 4179 (IGHV3-33)
ARGGVRGVIGFDY

SEQ ID NO: 8359 - protein, 9 aa, Homo sapiens
  Light chain CDR3 for antibody 4180 (IGKV1-9)
QQFNSYPFT

SEQ ID NO: 8360 - protein, 17 aa, Homo sapiens
  Heavy chain CDR3 for antibody 4180 (IGHV3-33)
AREIAMARGDNYYGLDV

SEQ ID NO: 8361 - protein, 9 aa, Homo sapiens
  Light chain CDR3 for antibody 4181 (IGKV1-9)
QQLNSYPLT

SEQ ID NO: 8362 - protein, 15 aa, Homo sapiens
  Heavy chain CDR3 for antibody 4181 (IGHV1-46)
AREKDYGSGSYPLDY

SEQ ID NO: 8363 - protein, 9 aa, Homo sapiens
  Light chain CDR3 for antibody 4182 (IGKV1-9)
QQLNSYPYT

SEQ ID NO: 8364 - protein, 15 aa, Homo sapiens
  Heavy chain CDR3 for antibody 4182 (IGHV1-46)
AREKSYGSASSPFDY

SEQ ID NO: 8365 - protein, 9 aa, Homo sapiens
  Light chain CDR3 for antibody 4183 (IGKV1-9)
HQLISYPYT

SEQ ID NO: 8366 - protein, 15 aa, Homo sapiens
  Heavy chain CDR3 for antibody 4183 (IGHV1-46)
AREKDYGSGSYPFDY

SEQ ID NO: 8367 - protein, 9 aa, Homo sapiens
  Light chain CDR3 for antibody 4184 (IGKV1-9)
QQLNSYPFT

SEQ ID NO: 8368 - protein, 17 aa, Homo sapiens
  Heavy chain CDR3 for antibody 4184 (IGHV3-33)
EREITRVRGDNYYGMDA

SEQ ID NO: 8369 - protein, 9 aa, Homo sapiens
  Light chain CDR3 for antibody 4185 (IGKV1D-17)
LQHNSYPYT

SEQ ID NO: 8370 - protein, 17 aa, Homo sapiens
  Heavy chain CDR3 for antibody 4185 (IGHV3-33)
ARAITMLRGDTSYGLDV

SEQ ID NO: 8371 - protein, 9 aa, Homo sapiens
  Light chain CDR3 for antibody 4186 (IGKV1-9)
QQFNGYPFT

SEQ ID NO: 8372 - protein, 17 aa, Homo sapiens
  Heavy chain CDR3 for antibody 4186 (IGHV3-33)
SREITMLRGDNYYGLDV

SEQ ID NO: 8373 - protein, 9 aa, Homo sapiens
  Light chain CDR3 for antibody 4187 (IGKV1-9)
QQLNGYPYT

SEQ ID NO: 8374 - protein, 10 aa, Homo sapiens
  Heavy chain CDR3 for antibody 4187 (IGHV3-33)
AREAVAGFEY

SEQ ID NO: 8375 - protein, 9 aa, Homo sapiens
  Light chain CDR3 for antibody 4188 (IGKV1-6)
LQDYNYPYT

SEQ ID NO: 8376 - protein, 10 aa, Homo sapiens
  Heavy chain CDR3 for antibody 4188 (IGHV3-33)
ARESTDGMDV

SEQ ID NO: 8377 - protein, 9 aa, Homo sapiens
  Light chain CDR3 for antibody 4189 (IGKV1-9)
QQLNGYPYT

SEQ ID NO: 8378 - protein, 15 aa, Homo sapiens
  Heavy chain CDR3 for antibody 4189 (IGHV1-46)
AREDYDGSGSYPIDY

SEQ ID NO: 8379 - protein, 9 aa, Homo sapiens
  Light chain CDR3 for antibody 4190 (IGKV1-9)
LQHNSYPYT

SEQ ID NO: 8380 - protein, 9 aa, Homo sapiens
  Heavy chain CDR3 for antibody 4190 (IGHV1-18)
ARGEPNIDY

SEQ ID NO: 8381 - protein, 9 aa, Homo sapiens
  Light chain CDR3 for antibody 4191 (IGKV1-9)
QQLNSYPFT

SEQ ID NO: 8382 - protein, 17 aa, Homo sapiens
  Heavy chain CDR3 for antibody 4191 (IGHV3-33)
AREITKVRGENYYGMDY

SEQ ID NO: 8383 - protein, 9 aa, Homo sapiens
  Light chain CDR3 for antibody 4192 (IGKV1-9)
LQLNSYPYT

SEQ ID NO: 8384 - protein, 15 aa, Homo sapiens
  Heavy chain CDR3 for antibody 4192 (IGHV1-46)
AREKYYGSGTYPIDY

SEQ ID NO: 8385 - protein, 9 aa, Homo sapiens
  Light chain CDR3 for antibody 4193 (IGKV1-9)
QQLNSYPLT

SEQ ID NO: 8386 - protein, 15 aa, Homo sapiens
  Heavy chain CDR3 for antibody 4193 (IGHV1-46)
AREGVTGYYPNRIDP

SEQ ID NO: 8387 - protein, 9 aa, Homo sapiens
  Light chain CDR3 for antibody 4194 (IGKV1-9)
QQLNSYPFT

SEQ ID NO: 8388 - protein, 17 aa, Homo sapiens
  Heavy chain CDR3 for antibody 4194 (IGHV3-33)
ASEITVVRGENYYGMDV

SEQ ID NO: 8389 - protein, 9 aa, Homo sapiens
  Light chain CDR3 for antibody 4195 (IGKV1-9)
QQLNSYPYT

SEQ ID NO: 8390 - protein, 15 aa, Homo sapiens
  Heavy chain CDR3 for antibody 4195 (IGHV1-46)
AREKYYGAGSDPFDE

SEQ ID NO: 8391 - protein, 8 aa, Homo sapiens
  misc_feature (4)..(4): Xaa can be Val or Phe
  misc_feature (5)..(5): Xaa can be Ser or Thr
  misc_feature (6)..(6): Xaa can be Ser or Phe or Thr
  misc_feature (7)..(7): Xaa can be Asn or Ser or Tyr
  misc_feature (8)..(8): Xaa can be Tyr or Ala or Gly
GFTXXXXX

SEQ ID NO: 8392 - protein, 8 aa, Homo sapiens
  misc_feature (6)..(6): Xaa can be Ser or Phe
GFTVSXNY

SEQ ID NO: 8393 - protein, 8 aa, Homo sapiens
GFTFTSSA

SEQ ID NO: 8394 - protein, 8 aa, Homo sapiens
GFTFSSYG

SEQ ID NO: 8395 - protein, 8 aa, Homo sapiens
GFTVSSNY

SEQ ID NO: 8396 - protein, 8 aa, Homo sapiens
CFTVSTNY

SEQ ID NO: 8397 - protein, 7 aa, Homo sapiens
  misc_feature (2)..(4): Xaa can be any naturally occurring amino acid
  misc_feature (6)..(7): Xaa can be any naturally occurring amino acid
IXXXGXX

SEQ ID NO: 8398 - protein, 7 aa, Homo sapiens
  misc_feature (2)..(2): Xaa can be Tyr or Trp or Ser
  misc_feature (3)..(3): Xaa can be Ser or Gly or Tyr
  misc_feature (4)..(4): Xaa can be Gly or Ser or Asp
  misc_feature (6)..(6): Xaa can be Ser or Asn or Ser and Asn
  misc_feature (7)..(7): Xaa can be Thr or Lys
IXXXGXX

SEQ ID NO: 8399 - protein, 7 aa, Homo sapiens
IYSGGST

SEQ ID NO: 8400 - protein, 7 aa, Homo sapiens
IWGSGNT

SEQ ID NO: 8401 - protein, 8 aa, Homo sapiens
ISYDGSNK

SEQ ID NO: 8402 - protein, 7 aa, Homo sapiens
IYSGGST

SEQ ID NO: 8403 - protein, 7 aa, Homo sapiens
IYSGGST

SEQ ID NO: 8404 - protein, 12 aa, Homo sapiens
  misc_feature (5)..(5): Xaa can be Gly or Ser or Ala
  misc_feature (6)..(6): Xaa can be Pro or Ala or Ser
  misc_feature (7)..(7): Xaa can be Arg or Ala
  misc_feature (9)..(9): Xaa can be Gly or Tyr
  misc_feature (10)..(10): Xaa can be Ile or Phe
ARDLXXXGXXDY

SEQ ID NO: 8405 - protein, 16 aa, Homo sapiens
AAPYCSSTSCHDAFDI

SEQ ID NO: 8406 - protein, 16 aa, Homo sapiens
AKHGYSYGYWLGYFDY

SEQ ID NO: 8407 - protein, 12 aa, Homo sapiens
  misc_feature (3)..(3): Xaa can be Asp or Glu
  misc_feature (4)..(4): Xaa can be Cys or Thr or Leu
  misc_feature (5)..(5): Xaa can be Leu or Met
  misc_feature (6)..(6): Xaa can be Gly or Val
  misc_feature (7)..(7): Xaa can be Tyr or Ile
  misc_feature (8)..(8): Xaa can be Gly or Pro
ARXXXXXXSMDV

SEQ ID NO: 8408 - protein, 11 aa, Homo sapiens
ARGHWEYYFDY

SEQ ID NO: 8409 - protein, 8 aa, Homo sapiens
  misc_feature (4)..(8): Xaa can be any naturally occurring amino acid
GFTXXXXX

1. A recombinant polyclonal protein (RPP) (also called a Recombinant Coronavirus 2 Immune Globulin (rCIG)), comprising
at least 100 first antigen binding proteins (ABPs) , each of the first ABPs comprising a cognate pair of heavy chain CDR3 and light chain CDR3, wherein each of the first ABPs specifically binds a SARS-CoV-2 receptor binding domain (RBD) or SARS-CoV-2 spike S1.

2. The RPP of claim 1, wherein each of the first ABPs comprises a heavy chain CDR3 having a sequence selected from SEQ ID Nos: 2, 4, 6, through 8390 (even numbers) and a light chain CDR3 has a sequence selected from SEQ ID Nos: 1, 3, 5, through 8389 (odd numbers).

3. The RPP of claim 2, wherein each of the first ABPs comprises a heavy chain CDR3 having a sequence selected from SEQ ID Nos: 2, 4, 6, through 4760 (even numbers) and a light chain CDR3 has a sequence selected from SEQ ID Nos: 1, 3, 5, through 4759 (odd numbers).

4. The RPP of claim 2, wherein each of the first ABPs comprises a heavy chain CDR3 having a sequence selected from SEQ ID Nos: 4762,4764, 4766, through 5082 (even numbers) and a light chain CDR3 has a sequence selected from SEQ ID Nos: 4761, 4763, 4765, through 5081 (odd numbers).

5. The RPP of claim 2, wherein each of the first ABPs comprises a heavy chain CDR3 having a sequence selected from SEQ ID Nos: 5084, 5086, 5088, through 6630 (even numbers) and a light chain CDR3 has a sequence selected from SEQ ID Nos: 5083, 5085, 5087, through 6629 (odd numbers).

6. The RPP of claim 2, wherein each of the first ABPs comprises a heavy chain CDR3 having a sequence selected from SEQ ID Nos: 6632, 6634, 6636, through 8390 (even numbers) and a light chain CDR3 has a sequence selected from SEQ ID Nos: 6631, 6633, 6635, through 8389 (odd numbers).

7. The RPP of claim 2, wherein each of the first ABPs comprises a heavy chain CDR3 having a sequence selected from SEQ ID Nos: 5084, 5086, 5088 through 8390 (even numbers) and a light chain CDR3 has a sequence selected from SEQ ID Nos: 5083, 5085, 5087, through 8389 (odd numbers).

8. The RPP of claim 1, wherein each of the first ABPs comprises a heavy chain CDR1 having the sequence of GFT[V/F][S/T][S/F/T][N/S/Y][Y/A/G] (SEQ ID NO: 8391).

9. The RPP of claim 8, wherein each of the first ABPs comprises a heavy chain CDR1 having a sequence selected from the group consisting of:

| | i. |
|---|---|
| (SEQ ID NO: 8392) | |
| | GFTVS[S/F]NY, |
| | ii. |
| (SEQ ID NO: 8393) | |
| | GFTFTSSA, |
| | iii. |
| (SEQ ID NO: 8394) | |
| | GFTFSSYG, |
| | iv. |
| (SEQ ID NO: 8395) | |
| | GFTVSSNY, |
| | and |
| | v. |
| (SEQ ID NO: 8396) | |
| | CFTVSTNY. |

10. The RPP of claim 1, wherein each of the first ABPs comprises a heavy chain CDRs having the sequence of I[Y/W/S][S/G/Y][G/S/D]G[S/N/SN][T/K] (SEQ ID NO: 8398).

11. The RPP of claim 10, wherein each of the first ABPs comprises a heavy chain CDR2 having a sequence selected from the group consisting of:

| | i. |
|---|---|
| (SEQ ID NO: 8399) | |
| | IYSGGST, |
| | ii. |
| (SEQ ID NO: 8400) | |
| | IWGSGNT, |
| | iii. |
| (SEQ ID NO: 8401) | |
| | ISYDGSNK, |
| | iv. |
| (SEQ ID NO: 8402) | |
| | IYSGGST, |
| | and |
| | v. |
| (SEQ ID NO: 8403) | |
| | IYSGGST. |

12. The RPP of claims 1, wherein each of the first ABPs comprises a heavy chain CDR3 having a sequence selected from the group consisting of:

| | i. |
|---|---|
| (SEQ ID NO: 8404) | |
| | ARDL[G/S/A][P/A/S][R/A]G[G/Y][I/F]DY, |
| | ii. |
| (SEQ ID NO: 8405) | |
| | AAPYCSSTSCHDAFDI, |
| | iii. |
| (SEQ ID NO: 8406) | |
| | AKHGYSYGYWLGYFDY, |
| | iv. |
| (SEQ ID NO: 8407) | |
| | AR[D/E][C/T/L][LNI][G/V][Y/I][G/P]SMDV, |
| | and |
| | v. |
| (SEQ ID NO: 8408) | |
| | ARGHWEYYFDY. |

13. The RPP of claim 1, wherein each of the first ABPs comprises:
i. a heavy chain CDR1 having the sequence of GFTVS[S/F]NY (SEQ ID NO: 8392), a heavy chain CDR2 having the sequence of IYSGGST (SEQ ID NO: 8399), and a heavy chain CDR3 having the sequence of ARDL[G/S/A][P/A/S][R/A]G[G/Y][I/F]DY (SEQ ID NO: 8404);
ii. a heavy chain CDR1 having the sequence of GFTFTSSA (SEQ ID NO: 8393), a heavy chain CDR2 having the sequence of IWGSGNT (SEQ ID NO: 8400), and a heavy chain CDR3 having the sequence of AAPYCSSTSCHDAFDI (SEQ ID NO: 8405);
iii. a heavy chain CDR1 having the sequence of GFTFSSYG (SEQ ID NO: 8394), a heavy chain CDR2 having the sequence of ISYDGSNK (SEQ ID NO: 8401), and a heavy chain CDR3 having the sequence of AKHGYSYGYWLGYFDY (SEQ ID NO: 8406);
iv. a heavy chain CDR1 having the sequence of GFTVSSNY (SEQ ID NO: 8395), a heavy chain CDR2 having the sequence of IYSGGST (SEQ ID NO: 8402), and a heavy chain CDR3 having the sequence of AR[D/E][C/T/L][L/M][G/V][Y/I][G/P]SMDV (SEQ ID NO: 8407); or
v. a heavy chain CDR1 having the sequence of CFTVSTNY (SEQ ID NO: 8396), a heavy chain CDR2 having the sequence of IYSGGST (SEQ ID NO: 8403), and a heavy chain CDR3 having the sequence of ARGHWEYYFDY (SEQ ID NO: 8408).

14. The RPP of claim 1, wherein each of at least 50% of the total ABPs in the RPP comprises:
i. a heavy chain CDR1 having the sequence of GFTVS[S/F]NY (SEQ ID NO: 8392), a heavy chain CDR2 having the sequence of IYSGGST (SEQ ID NO: 8399), and a heavy chain CDR3 having the sequence of ARDL[G/S/A][P/A/S][R/A]G[G/Y][I/F]DY (SEQ ID NO: 8404);
ii. a heavy chain CDR1 having the sequence of GFTFTSSA (SEQ ID NO: 8393), a heavy chain CDR2 having the sequence of IWGSGNT (SEQ ID NO: 8400), and a heavy chain CDR3 having the sequence of AAPYCSSTSCHDAFDI (SEQ ID NO: 8405);
iii. a heavy chain CDR1 having the sequence of GFTFSSYG (SEQ ID NO: 8394), a heavy chain CDR2 having the sequence of ISYDGSNK (SEQ ID NO: 8401), and a heavy chain CDR3 having the sequence of AKHGYSYGYWLGYFDY (SEQ ID NO: 8406);
iv. a heavy chain CDR1 having the sequence of GFTVSSNY (SEQ ID NO: 8395), a heavy chain CDR2 having the sequence of IYSGGST (SEQ ID NO: 8402), and a heavy chain CDR3 having the sequence of AR[D/E][C/T/L][L/M][G/V][Y/I][G/P]SMDV (SEQ ID NO: 8407); or
v. a heavy chain CDR1 having the sequence of CFTVSTNY (SEQ ID NO: 8396), a heavy chain CDR2 having the sequence of IYSGGST (SEQ ID NO: 8403), and a heavy chain CDR3 having the sequence of ARGHWEYYFDY (SEQ ID NO: 8408).

15. The RPP of claim 1, further comprising at least 100 second ABPs, wherein each of the second ABPs specifically binds an antigen of SARS-CoV-2, optionally wherein the antigen of SARS-CoV-2 is not a SARS-CoV-2 receptor binding domain (RBD) or SARS-CoV-2 spike S1.

16. The RPP of claim 1, wherein each of the first ABPs comprises a scFv.

17. The RPP of claim 1, wherein each of the first ABPs is a full-length antibody.

18. The RPP of claim 17, wherein each of the first ABPs is a human IgG1 subtype.

19. The RPP of claim 1, wherein the RPP is recombinantly produced using sequences derived from B cells, plasma cells, or plasmablasts in a sample from a donor injected with the SARS-CoV-2 receptor binding domain (RBD) or SARS-CoV-2 spike S1 or infected with SARS CoV-2, optionally wherein the donor is a human.

20. The RPP of claim 1, wherein each of the first ABPs is recombinantly produced using sequences derived from B cells, plasma cells, or plasmablasts in a sample from more than one donors injected with the SARS-CoV-2 receptor binding domain (RBD) or SARS-CoV-2 spike Si or infected with SARS CoV-2, optionally wherein the donors are humans.

21. The RPP of claim 20, wherein an average binding titer of the RPP is at least 50 times higher than an average binding titer of antibodies in a serum sample from the same donor, wherein the binding titer is measured by anti-SARS-CoV-2- ELISA.

22. The RPP of claim 20, wherein an average neutralization titer of the RPP is at least 50 times higher than an average neutralization titer of antibodies in a serum sample from the same donor, wherein the neutralization titer is measured by an in vitro assay.

23. A pharmaceutical composition comprising the RPP of claim 1 and a pharmaceutically acceptable excipient.

24. A method of treating a subject in need thereof, the method comprising administering to the subject an effective amount of the RPPs of claim 1.

25. The method of claim 24, wherein the subject has a viral infection, optionally a SARS CoV-2 infection.

26. The method of claim 25, further comprising administration of one or more agents.

27. A plurality of isolated polynucleotides, each polynucleotide encoding an ABP of the RPP of claim 1.

28. A plurality of host cells comprising a plurality of isolated polynucleotides, each polynucleotide encoding an ABP of the RPP of claim 1.

29. A method of producing a recombinant polyclonal protein (RPP) comprising at 100 antigen binding proteins (ABPs), comprising:
culturing host cells under conditions for expression of the ABPs and isolating the RPP,
wherein the host cells comprise a plurality of polynucleotides, each polynucleotide encoding an antigen binding protein (ABP) comprising a cognate pair of heavy chain CDR3 and light chain CDR3, wherein each of the first ABPs specifically binds a SARS-CoV-2 receptor binding domain (RBD) or SARS-CoV-2 spike S1.

30. The method of claim 29, further comprising the step of enriching a subset of the plurality of polynucleotides based on activity of proteins expressed from the polynucleotide against SAR-CoV-2.
